United States Patent Application Publication US 2013/0330799 A1 - sequence listing, part 4

SEQ ID NO: 285 - DNA, 157151 bp, unknown
  Altogen  635822 strain
  misc_feature (781)..(781): n is a, c, g, or t
  misc_feature (3350)..(3350): n is a, c, g, or t
  misc_feature (99708)..(99708): n is a, c, g, or t
  misc_feature (137856)..(137856): n is a, c, g, or t
  misc_feature (139254)..(139298): n is a, c, g, or t
gagggttagggtgaggggcatcaggaggtgcattgcttactctttgttgacgccaaaaataaaacggcccggtgatgatcaccaggccgttatcggtattaccagagtctaaaggtgccgtagtggcacctttgtctcatcaggctttagctgcctgtgcatcagcctgagccgactggatcgccgtcagggctacggtatagacgatgtcgtcaaccagagcaccacgggacaggtcgttcaccggcttgcgcatgccttgcagcattggcccgatagataccaggtcagcagaacgttgcaccgctttataagtggtgttaccggtgttcagatccgggaagatgaacacggtcgcctgaccggctactggcgaattaggcgctttggatttggccacgtcggccatgatcgctgcgtcatattgcagtgggccatcgatgatcagatccgggcgtttttcctgtgccagacgggtcgcttcacgcactttctcaacgtcgctacctgcaccggaattaccggtagagtaagagatcatcgctacgcgtggttcgataccgaatgcggctgcggaatcggcagactgaatggcgatttcagacagctgttcagcggttggatccgggttgatcgcgcagtcaccgtagaccagaacctggtcaggcagcagcatgaagaacacggaggaaaccagggaactgcccggtgcggttttgatcaactgcaacggtgggcggatggtattggcgggggggtgaacggcaccggaaaccaggcntggtgtgaacggcaccggaaaccaggccgtcaacttcgcctttctccagcatcagggtgccgagaaccacgttgtcttccaactgctcacgcgcaaccacttcggtcatgcccttgctcttgcgcagctcaaccagacgcggcacatagagttcacgcacggcgaccggatcgacgatctcgatgcctttacccagctcaacgccctgcgcggcggcaacgcgtttgatctcttccggattacccagcagcacacattccgcgataccacgttcggcacagatggccgccgctttcacggtgcgtggctcgtcgccttccggcagcacgatgcgtttacccgctttgcgtgccaactcggtcagctcataacggaacgccggtggggacagacgacgcgaacgctcagaagtggcggtcagggactcgatccattcggcgttgatgtggctggccacgtagttctgtactttctcaatacgctgatggtcgtctgaaggcacttcgaggttgaagctttgcaggctcagcgaggtctgccaggtgttggtgtcaaccatgaacaccggcaggccggtttcaaaggcgcgctcacacagcttgttgatggaggcatcgatctcgtagccgccggtcaacaggatggcaccaatttccacgccgttcatcgcggccaggcaggctgaaaccagcacgtccggacggtcggcagaagtgactaacagggaacctgggcggaagtgttccagcatgtgcggaatgctgcgcgcacagaaggtcacagattttacccggcgggtcatgatgtcgccttcgttgatcactcgcgccttcaggtggcgggccatatcaatggcacgggtagcgatcagttcgaagctccacggtacgcaacccaacaccggcagcgggctgttggcgaacagctgtgcaggatcgacgttggctacgctggccttggtggaatcgtcaaagatttcggacaggtctgggcgagtacggccctgatcgtccaccggagcgttcagcttgttgatgatcacgccggtaatgtttttgttcttgctgccgccgaagctggagcgagccagttcgatgcgctcggtcaactgggctggagaatcgttgcccagtgccagcacaaagacgatctctgcgttcagcgttttggcgatctcgtagttcagcgagttggcgaactgatgcttacgggtaggcaccaggccttcgatcagcaccacttctgcgtctttggtgttttcgtggtaacgggccacgatctcttccatcagcacgtcctgctggttggagctcaacaggccctcaacgtagctcatacgcaggggttcggccgccggaatggtcgagttgctgcggatgatggtggtggtctggtcgagggaatcgccgccggtacgcggttgggcaataggtttgaacacgctcaggcgaacgcctttttgctccatggagcggatgacacccaggctgacgctggtcagaccgacgctggtgcctgtggggatcaacataattgtacgtgacacagaatagtcctcttcacggttttctgcctgcaacgggggcgcagacaaagatgacaggctcaaagcaacaccgccagcctgggctgacggtgtggagagcattaagcggtcagacgggaagcgtcttgcgcgatgaccaattcttcgttggtcgggatcaccagtgccggacggctgccgtctttggtgatgttgcctgatttgccgaagcgggcagccaggttgcgttcatgatcgatttcaaagcccagcaggcccagtttgtccagggtcagctcacgtaccatcgcggcgttctcaccgataccaccggtgaagatcacggcatccagacggccttccatcagggcgctataggcaccaatgtacttggccagacggtggcagaagacgtccatggcgcgcttggcatcagccttggtgtcatagttgtcttcaacgtaacggcagtcgctggtgacttcagtcaggcccagcaggccagactctttggtcagcatcttgttgatctggtcaacgctcatgcccatggcgtcgtgcagatggaagatgatggctggatcgatgtcaccactgcgggtacccattaccagaccttccaacggggtcagacccatggaagtatcaacacacttaccgttgcgtactgcggttacggacccgccgttgcccagatggcaggtgatgatgttaacttcttcaaccggcttgttcagcgccttcgcggcttcttgcgtcacatagaagtggctggggccgtgtgcgccgtagcgacgaacgccatggtcgcggtacaggctgtacggcagggcatacagataggactcttccggcatggtctgatggaacgcggtgtcaaacacggcaacgtttttatcagccagattagggaaggatttcaacgcttcagcaataccgatcaggtgagccgggttatgcagtggtgcaaaaggtaccgaatctttgataccctgcaggacttcgtcgttgatgacggcggaagccgtgaacttctcgccgccncgccgccgtgcacgatgcggtggccgatagcggtcaactgggcagaaagctctggtttttgtgccagaatagtattaacaatgaagttcagcgcttcgctgtgcgctgcaccggcacccagtgccgcttcttgtttactgccatccattttccatttgatacgggcttcaggaagatggaagcactcggccaggccagagaggtattcttcaccgttggctgcatcgatgatggcgaatttcagggaagaactgccgcagttaaggaccagtactagcttactcgacatggaagtacctacttatagttcgtgttggtattaaggaagacccaaaaacacgtggtgaataaaacgtcaatcagacaacaagcgtagcgcataatgccgttgacatttatgattaacatcatgtcagtgatacaaaggacacaatgatgaaaaaaccgatgatttctctgcggtttaagcgatcctgatttttaccgtttcctagccccacatggccgccaacggcaggattagggagatagggctaaaagttgacaaatcttctgtcatcttctaccggcacatggccggcttaggataccgatagcccgccacaaacacaaaataaatttaaagcttcaacttttttgttagtgtgtttgcaagaatattttattttttatacgtgaagttgaggtgcgcaatgacgagcagaccatccggttccgtaagctggtttcagatattccagcgcgggcagcattacatgaaaacctggccagcagataaacggctggcaccgcttttccctgagaaccgcgtggcgcgcgctacccgctttgccgttcgctttatgcccccgttggcgatttttaccctgacctggcagattgcgctcggcggtcagcttggcccggcgatcgctactgcattgttcgcctgtagcctgccgatgcaggggctgtggtggttgggccgtcgttccgtgacgccgttgccgccaaccttgctgcaatggttccatgaggtccgtaacaagctggcggaagccgggcaggcgattgcccccgttgaagggacgccaacctaccaggcgctggcggacgtgctgaaacgtgccttcaagcagttggacaaaaccttcctcgacgatctttaagcgctactgggccggggactcaccggccttgcttgctttatgccgcaaatttgtgccctgatcatgtctggccacgccccacatttgaccaatatcccggttcaaatcaaagaaaggtttagttgtgattccacgccatactgaagtcatgcgatgctctggttaatttgcagaactgaggacaatgaaatggaaatgactcacgcccaacggctgattttgtcgaatcaatacaagatgatgaccatgctcgatccggacaatgcagagcgctaccgccgcttgcagacgatcatcgagcgcggttttggtttgcaaatgcgcgagctggatcgtgattttggtgagatgagcgaagaagtgtgccgcaccatcatcaacatcatggaaatgcaccatgcgctccaggtttcctgggagaacctcaaggatcgccaggggctggacgcgcgtcgcctggcattccttggttttgatgccgcaaccgaagcacgctacctgagctatgtgcgtttcctggtgaacacggaagggcggtatactcatttcgattctggtagccacgggtttaacgcccaaaccaaaatgtgggaaaaataccagcgcatgctgagtatctggctatcctgcccacgccagtatcatttgagcgccgtcgagattgcgcaaatcatcaatgcctgattaaacgtagaggggtttcccgtggagtgtaagggttttctgttcgatcttgatggaacgatagtagattcattaccggcagtagagcgagcctggacgcattgggcagaacgccatggcatcagcccgcaacaggtgctggactttatccacgggaaacaggcgatcacctcgctgcgtcactttatgccgaatgccaccgaggctgagctacagcatgagttcaaactgcttgagcaggtggaagcagaggataccgacggcgtcaacgctctgcctggtgcattggccttgctggagcagatcaatgcgttggggataccttgggcgattgtcacctcgggttccgtgccagtagctaacgcacgccgtattgccggtggattgccacttcctgaagtgtttgtcacctgtgagttggtcaaacaaggtaaaccgtatccagacgcctacctgttaggggcaaaaggccttgggctggcaccgcaggactgtgtggtggtggaagatgccccagccgggatcctttccggtttggcatctggctgccaggtgattgcggtaaatgcaccggcagacgcaccgaaactaaaccaggtggatctgatcctttcctccttggaacagctcaagataaccaggtccgaacagggtgcaatcatcgaacttattgcttaatctgcactttattaccccaatttgattagaccccgcatcggcggggtttttttatgctaatttcttatgccgggatcactgcagaatgaggccgttttgaacagcgaattactttgggttttgagtttattgttaatagccattgtgctgtttaccaccaacaagctgcgtatggatgtggtggcactgttggtgatcattgcgtttgtgctcagtggaaccttgagcttgcaagaggcaacggctggcttcagcgatcctaacgtcattctgattgccgccctgttcgtcattggcgaagggttggtgcgcaccggggtggcctatcaggttggtgactggttagtgagagtggcgggcagcagtgaaaccaagatgatgatgctgctgatgtttaccgttgccgggctgggggcctttatgagctcaaccggggtggtagccatctttatccccgtggtgctcagcgtagcggtacgcatgaaaatctccccagggcggctgatgatgcctctgagctttgccggtttgatcagcggcatgatgacgctggtcgccacgccgccgaatatggtggtcaacagcgaactggtgcgtgaaggcatcactggtttcgggttctttggcgtcacgccaattggtttggtggtgttgctgttgggcgtgggttacatgctgattgcgcgccgctggctcggcgacagcggcggcaccaaaaccaagtcggcctgggagcgtcggactttccgcgatttaattcgcgactataagctcaccggccgggcgcgtcgtttggcggtgcgtagtggttcacccctgattggccgttcgctggatgagctgcatttgcgcgcgcgttacagcgccaacgttatcggcatcgagcgctggaagcgttttcgccgggtgatgatcagcgcctttggcagcacggaactgcgcgaaggggacgtattgctgatcgacatgacggattgcgatatcgatctgcgtcagttctgtagtgagcaacaacttgagcccatggtgctgagaggggaatatttctccgaacagtcacgcaacgtggggatggccgaagtttcgctaatccctgagtcggccctgctggggaaaagcgtgcgcgatgccactttccgtagccgttacgatctcaacgtagtcggcatccgccgcaatggtgaaaccctgcaaggcaagctggtggatgagcctttggggctgggggacattctgttggtgatcggcgattggaaagcaatccgccagttgcaggccaaaacccatgactttatcgtcttgaacctgcccgcagaagtggacgaagtggcaccggctatcacccaggctcctcatgcgttgttctgcctggcgctgatggtggcaatgatgctgaccgacgagatcccgaatccgatcgccgcgctgatcgcttgcctgttgatggggcgctttcgctgcatcgatatggaaagcgcctataaggcgatccattggcctagcatcattttgatcgtcggtatgatgccctttgcccaggcgttgcagaaaacgggcggggtagacctgatcgtccgtgggttgatggacgttgccggtgacgccgggccacacgtcatgctggcctgtctgtttgtcctgtgcgccaccatagggctgtttatctccaacaccgccacggcggtattgatggctccaatagccatcgccgcggcccgtgaaatgggagtttcgccttatccgttcgccatgattatcgcgattgccgcctctgccgcctttatgacgccggtgtcatcaccggtcaatacgctggtgttggggccggggaactacaagtttggcgattttctgaaaattggggtgcctttcaccgtgctggtgatgattgtcagcgtgatcctggtgccttggttgtatgcgttttaagcacacggtttgcgttttatgtcaggattaagaaaaggcgctttatctttttttagaacgctaacgaccgaaaccagaaagcgttttggcattttatcggctcatgctgcagctcgttgagactttacggcgatcggtgtcgcccaagcttagtttagcgatccttctggagttgccatgaaaatgaaacatggatttataacccttactttagcttcgtagtgttggacgtagataaacacacccgggtgcaagaatataccagcgcgtattacggggatattgccaccggtgagaccaccgaaagcctgaaggtacgacctgcggctaaggtgtcgcagactgccaggtgcatatgcacctggctctaagctcacattgttgagtcgctgctgatttcatccagcgaaaggctgaaactcgggatgaatacctgcataaaataatccatttccgggctgtggcgcatttgcagcgttttctccagacgagccttggcctgcttgaactcattattccccgccgaaagctcctccaggcacttcagataagcgcatagcgcatcggcctgcttcacgatcagcttttcgtcctcgctgtgatgatgctcatccaggatagagcggaaatcgttttgtaactcttccggcagcatctccagcagcttttgctgggcaatcttctcgatttttttgtattcgtgggcaatctgcgggttgtaatacttgatgggagtaggcatatcaccggtcagcacttcgctggcatcgtgatacatcgccaacaacgccacgcgttcggcattcaggttgccgttaaacttgcggtttttgatcgcggccagcgcatgggcgacaaaggcgacctgcaaactgtgttcggaaacgttttcggtacgcacattgcgcatcagcggccagcggctaatcagtttcaaacgggacaggtgggcaaagaagtggctctggctcatgatgttctctctttgggtctgtaggagagcagtatactgcgtcagtgccaatcagagaaacgggcgccgcacgcagcgcccggcaaaaattactggtgataggtttccaggaagcggcccagtttgcccaccgccatttccaattcatccacgcggggcagagtaacgattcggacgtggtctgggtaaggccagttgaacgcgctgccctgtaccagtaacaccttctcttgcaacagcagatccagcaccagcttctggtcgtcgcggatgttaaagcgcttggcgtcgatgcgtgggaacatatagagcgcaccctgaggtttcacgcaggaaacgccagggatatcgttcagcagttcccaggtgcggtcacgttgttcatacaggcggccaccaggctgaataaattcgctgatgctctggtaaccccccagtgccgtctgaatcgcatgctgcattggtacgttggcacaaagacgcatggaagccagcatctccagcccttcaatatagcctttggcatgcttcttcggcccgttgagcaccatccagccctgacggaaaccggcaacgcggtaggttttggacaggccgttaaaggtgacggtcagcagatctggggccagtgcggcgatggagtgatgctctgcctcgtcgtagaggatcttgtcgtagatttcgtcggcaaagatgatcaggtcatgctggcgggcgatctcgacgatctgttccagcagttctttgctgtagaccgcgccggttgggttgttaggattgatgatcacgatgccacgggtgcgtggggtgattttgctgcgaatatcatccagatccgggaaccagccggcttcctcgtcgcacatatagtgcacggccttgccgctggaaagcgacacggcggcggtccacagcggatagtctggcgcaggcaccagcatttcatcaccgatattcagcagcgcttgcatggactgcacgatcagctcagaaacgccattgccaatgtagatatcctcaacggtcacgtcacgcatgttacgtgcctggtagtgctgcatgatcgccttgcgcgccgagtacagccctttggaatcgcagtagccttgtgccgttggcagattgcggatcacgtcgaccagaatttcatcgggggcatcaaagccgaatggggcagggttgccaatgttcagcttgaggactttattgccttcttcttcaagacgtttcgcttctttgagcaccgggccacgaatgtcataacagacgttgtccagtttgctggatttctcaatgggggacatagaaagttgagccttttgctaagatagggtcgttcctaccgtggaacaccgcaatccgtccaatgtactcctggaggccgggcttttgaagggttatgcactgctttggtgaaaacgatcggcaaaaatcgctttttaagacaataactgtctgaattgatcgatttttcagtgattaagtctgaatttgtatttattttaagatttatatgtcggatgatgagcgcatcacgtaaggggtttttatcagttaaccgctgaaagacgtgcgccaagcgccagaaaaacaccaaagccgcataaaaatagtaatatgggattaatctggtttcttgtcggtactgacaataccacactgagttgaagtagaattacattagacccacttcagtaattaacttaaattttatttaagtaatggtcagtgtcttttaataatcaaaagacttactgcttgaatttattaaattccctaatcgatgagtcgttggatatacgagggggttgttaatattttgtacagaaaacaacaatgctgtcatggtctctggcggccagagatcgaggtaaccgggaggaaaggggggattttgcccgcataggattatcaatgcttataagggtaagcacttttcgtcgtaactttcaccactatcaataagccgttgcgatagatcatggataaaaagcgatgcagataacgaaatataagtaatttttttgccctcttctaatgagtggggtactgtcataagtggcgcatgcccttttcagctgcgtcttagaaatacaccagggtagtttgtaaattagaatttaaaaagtgaagaaaacactatgacaagtgcaaatcgtccgatacttaatctcgacctcgatctgctaagaacctttgttgctgttgctgatttgaatacgtttgcggcggctgccgttgccgtttgtcgtactcagtccgcagtcagtcaacaaatgcagcggttagagcaattggttggcaaagagttgttcgcccgtcatgggcgcaataagttgttaaccgaacacggtatccagcttctcggctacgccaggaaaatcctgcgcttcaacgacgaagcctgtgcctccttgatgtacaacaatatcaagggtgtcctgactatcggtgcttctgatgacaccgccgatagcattttgcccttcttgctaaaccgcgtgacgtcggtctatcccaagctggcgattgatgtgcgggtgaagcgtagtccgttcatgatcgacatgctgaagaacggcgaagtggatctggccatcaccaccgtggataccgaagggcatccgcacatcgttctgcgcacgtctccaacgctgtggtactgctcggcggattaccattaccaggcgggggaaccgatccctctggtggtgatggatgagccaagcccgttccgtgcgatggcgatcaagcaccttgacgctgccggtattccttggcgtattgcctacgtggcctctacgctgtctgcggtgcgcgcggcgtgccgggcaggtttggggatcaccgtacggccaatcgagatgatgagcccagatctgcgagtcctgggggcgacggaaggtttaccacatcttcctgatactcagtatgcgctgtgcaaagacatgaagtgcgaaaatgaactggccatggcgatcttcagtgccgtacaaaacggcagtgagatttaccacttcggtggcggtgaatcttcggtgatcgatgaaggttccagcctggtggatagcgaagagtagcgttttaccctaagcttgccgtattgaaagttacaaacctctgccatggcggaggttttttttagcttaaaaaaagggaaattaaggattttggcctgttgaaggtaaattcaatgctaaatgggtatttcttcatggtttctagccgatgaaaccctcatttcttcgtattgctcgttttttatgcagtgataacaatgagtaaatgcctggagttggtagggttattttgctattttacgctgacgtttttttacctgaaattgacaaaaattgttaaactgccacactttttttgaggatttctgcctgaaacgtgtcctggatcaaaaaaatacccctaggtagtgagtggaacaacagggaattcctgagagaatggtatagtaaaagtgaaatgtgcctgcggggttatatctatctgtttccgttgagcaatcaactgacacgatttagcctaagccaagcgcatcatatgttaattaaatgcttcgtatgtaaattagtgtgtagatacttttgtcaaagttgacagaaggttatagaaaggagtaaaaagcccacagtaaaacactgcctaactctctgtaaaagcagtctgtttgtgtggttatttatccttcccttaaatcgatgtggtgcactaactgccagttacaagagcagagcgatcgacgccacttttgatgagtaagcatagagtatgtcaacaaccattgaagtcatcgctcatcactgggcgttcgccgtatttcttatcatggctatcgggctctgcggcttaatgctgctgggtgcgttcttcttgggtgggagagcccaggctcgctcgaaaaacaccccctatgaatcagggatcgactcggtcggtacggcgcgcctgcgtctgtccgccaagttttacctggtggccatgttcttcgttattttcgatgttgaagccttatacctgtatgcctggtcggtctccattcgtgagagcggttgggtaggctttatcgaagccgccattttcattttggtgttattggctggtctggtttatctggtgcgtatcggcgcattggattggactccaacgcgttccaagcgtttgagcaagccaggtaccatcaagaacgctagcaacagtcatccgcagtaacagcgaggcattaagatggactatacgctcacccgcatagacccgaacggtgagaacgaccgttatcccctgcaaaaacaggagatcgttggcgatccccttgagcagcaggttcaccgtacggtttacatgggtaaactcgaacatgctttgcatgacatggtgaactgggggcgtaaaaactctctttggccgtataacttcggcctttcgtgctgttatgtggaaatggtgacctcgtttaccgccgttcacgacgtggcgcgttttggtgcggaagtattgcgtgcctccccacgccaggcagactttatggtcgttgccggcacctgctttaccaagatggccccggttattcagcgcttgtacgagcaaatgctggagcctaaatgggtgatctcgatgggcgcctgcgccaactccggcggcatgtacgacatctactcggttgttcagggcgtggataaattcctgccggtcgacgtgtatatcccaggctgtccgccgcgcccggaagcttacatgcaggcactgttgctgctgcaagaatccattggcaaagaacgtcgcccgctgtcgtgggtcgttggcgatcagggtgtgtaccgcgccaatatgccatcagaaaaagaacgtaagcacgccgagcgtattgcggtaaccaaccttcggtcgcctgacgagatttaagacgttcatttaacgtccatcttagtgcgctattggttaacacagcgaaaagttgaacttgcggcgaaataaccctttagtgtggtgaaaaaaattatgacagatttaacgacgcacgaagctctgcctgcttggcatacccgcgatcatctcgatgatccggtgatcggcgaactgcgcaaccgttttgggccggaagcctttactgttcagcccacccgtaccggaatgcccgtggtatgggttaaagttgagcagttgctggaagtgatgacgtttttgagaaaacaaccgaagccgtacgtcatgctgttcgatctgcatggcatggacgagcgtcttcgtccccaccgtgaaggcttgcctgccgcggacttctctgttttctaccatctgatttctgttgaacgtaaccgtgacatcatgctgaaagtggcgctgtctgaaaaagacctgcacgtgcccacagcaaccaagattttcccgaatgccaactggtatgagcgcgaaacctgggaaatgttcggtattaccttcgacggccacccgcacctgacgcgcatcatgatgccgcagacctgggaaggccatccactgcgtaaagactacccggcgcgtgctaccgaattcgatccctttgtgttgaccaagcagaaagaagatctggagatggaatcgctgaagttcaagccggaagagtggggcatgaagcgcggcaccgagaacgaggacttcatgttcctcaacctcggcccgaaccacccgtcttcacacggtgcattccgtattattctgcagctggacggtgaagacatcgtcgactgtgtgccggacgtgggctaccaccaccgtggcgcagagaagatgggcgaacgccagtcctggcacagctttatcccgtataccgaccgtatcgaatacctcggcggctgcgtaaacgaaatgccttacgtactggcggtggaaaaactggccgggatcgtggtgccggatcgtgttaacaccatccgcgtgatgctgtctgaactgttccgcatcaacagccacctgctgtacatcagtacctttatccaggacgtgggcgccatgaccccggtgttcttcgcctttaccgatcggcagaaagtgtacgatctggtggaagcgattaccggtttccgtatgcacccggcctggttccgtattggtggcgtggcacacgacctgccgcgtggctgggatcgcctgctgcgtgacttcctggactggatgccgaagcgcctcgactcctatgtgaaagccgcactgcacaacaccattctgaaagggcgttctgtcggcgtcgcttcttacaacgcgaaagaggcgttggaatggggtgtgaccggtgctggcctgcgtgctaccggcgttgagtttgacgtgcgtaaatggcgtccatactccggctatgaaaacttcgatttcgaagttccggtcggcgacggcaacagcgactgctacacccgcgtgatgctgaaagtggaagagctgcgccagagcctgcgcattcttgagcagtgcctgaacaacatgccggaaggcccgttcaaggccgatcatccgctgaccacgccgccgccgaaagagcgcacgctgcaacatattgaaacgctgatcacccacttcctgcaggtttcctggggcccggtgatgccagccaacgaatcattccagatggttgaagccacgaaagggatcaacagctactacctgaccagcgacggcagcaccatgagctatcgcaccaggatccgtacgccaagctatgctcacctgcagcaaatccctgcggtgatccgtggcagcctggtctctgacctgatcgtctatctgggtagtatcgattttgtaatgtcagatgtggaccgctaactatgcatgatcttaaagacactcacgtgagtcacgatgcgcttgaggccaccaatgcagccgctccacagagcggcgctgatgcatttgtgctgagtgcggaagaacgtgatgcgatcgagcacgaaaagcaccattacgaggatccacgcgccgcctccattgaagcactgaagatcgtgcagaagcagcgtggctgggttccggatggggcgatttatgccatcgctgaagtgctgggcatcccagccagcgacgtagaaggcgtggccacgttctacagccagattttccgccagccggtaggacgccacgtgatccgttactgtgacagcgtagtttgtcacatcaacggctatcagggcattcaggccgcgctggaaaagaaactcaacatcaagccgggccagactaccttcgacggtcgtttcaccctgctgccgacctgctgtctgggtaactgcgacaaaggcccgaacatgatgatcgatgaagatactcatgctcacctgacgccagaaaacgcggtcgaactgttggagcggtataaatgatgattgatatcaaacgtactgccgaaatgcatccgctgacctggcgcctgcgcgatgaccaacagccggtatggctggatgaatatcgcagcaaaaacggctaccagggcgcggaaaaagcgctgaaaggcatggccgccgacgacatcgtcactctggtgaaagatgccgggctgaaaggtcgtggcggtgcaggtttctccaccggtttgaagtggagcctgatgccgaaagacgaatccatgaacatccgttacctgctgtgtaacgccgatgaaatggagccgggcacctataaagaccgtctgctgatggagcaactgccgcacctgctggtggaaggcatgttgatttcggcattcgcgctgaaagcctaccggggttacatcttcctgcgtggcgaatacgtcgaggccgcagtgcatctgcgccgtgcgattgcggaagctaccgaagcaggcctgctgggcaaaaatatcatgggcagcggctttgacttcgagctgttcgtccacaccggcgctggccgctacatctgcggtgaagaaacggcgctgatcaactcgctggaaggtcgccgcgccaacccgcgctccaagccgccattccccgcttctgtgggcgtatggggcaaaccaacctgcgtgaacaacgttgagaccttgtgtaacgtgcctgccatcctcgagcatggtgtggactggtacaaagggatctccgccggtaagagtaacgacgctggtaccaaactgatgggcttctctggccgggtgaaaaacccaggcgtctgggagctgccgtttggtaccactgcgcgtgaaattctggaagattacgccggtggcatgcgcgatggcctgaaatttaaagcctggcagccgggcggggcgggtaccgatttcctgaccgccgaccacctggatctgccaatggacttcgaaagcatcggcaaagcgggcagccgtttaggtacggcgctggcgatggcggtagatcacgaaatcggcatggttcccctggtgcgtaacctggaagagttctttgcccgtgagtcctgcggctggtgtacaccgtgccgtgacggcttgccgtggagcgtgaagatcctgcgtgctttggaaagaggcgaaggccagccgggggatatcgaaaccctcgagcaactgtgccgttcccttggcccaggtaaaaccttctgcgcccatgcgccaggtgccgtagagccactgcaaagcgcgattaaatatttccgtgaagagtttgaagccgggatttccccacagtacttgggcaatctccaggcggttggcggcattcagccaaacaacttgttgaagcaacgctggtaatcccgctttgcctgggtgcggtgagcgcgccctgaaacacggccagaatttttgattaacgcctgccttatggcaggccacttggaagcatgctgactatggctacgattcatgtagacggcaaagaatacgacgtagatggagccgacaacctgttgcaggcgtgtctctccctaggcctcgatattccttacttttgctggcatccggcgcttggaagcgtcggcgcttgccgccaatgtgcggtaaagcaataccaaaacgcggacgatacgcgtggccgtttggtgatgtcctgtatgacaccggcatccgatggaacctttatttccatcgatgacgcagaagccaaacagttccgtgaaagcgtagtcgagtggttgatgaccaaccacccgcacgactgtccggtatgtgaagagggcggtaactgtcacctgcaagatatgacagtaatgaccggccacagcttccgtaaatatcgcttcagtaagcgcacccataacaaccaggaactggggccatttatctcgcatgagatgaaccgctgcatcgcctgttaccgttgtgtgcgttactacaaagactacgcggatggcaccgatttcggtgtgtacggcgcgcacgacaacgtctatttcggtcgtccggaaagtggcacgctggaaagcgagttctccggtaacctggtagaagtgtgcccaaccggcgtattcaccgacaaaacccactccgagcgttacaaccgtaagtgggacatgcagtttgctccgagcatctgccagcagtgcagcatcggctgtaacaccagcccgggtgagcgctatggcgaactgcgtcgtatcgaaaaccgttacaacggcagcgtaaaccactatttcctgtgtgaccgcggccgctttggttatggctatgtgaaccagaaagatcgccctcgtcagccgcagcaactgcgtggcaacgactggatcaccctgaacgccgagcaggcgatgcagggcgcggcagatattctgcgtcaggccaacaaaaccatcggtatcggttcaccgcgtgccagcctggaaagcaactttgcgttgcgtgaactggtcggcgccgagaacttctataccggcatcaatcaggctgaacaacagcgcctgaacctgatgctcaacgtgttgaaaaacagcggcgtttatacgcctaacctgcgcgaaatcgaaagctacgacgcggtgttggtactgggtgaagatttgacccaaaccggcgctcgtatcgcgctgtcggtgcgtcaggcagtgaaaggtaaagcccgcgcgatggctgcggcacaccgcgttgccgattggcagatcgcggcggtgcaaaccatcgggcagcacgccaaacacccgctgttcgtcactaacgtcgataacacccgcttggacgacattgccgcctggaactatcgtgcgccggtggatgatcaagcccgtttaggcttcgccattgcccacgcgctggatgattccgctcccgcggtgaccgatctggccgaagacctgaacaagaaaattgatgtgatcgtacaggccctggccggtgcgcagaagccattgatcatcaccggcagcaatgcgggtagtgaagcgatcattgaagctgcggccaacattgccaaggcgttgaaaggtcgtggtgccaatgtcggtatcaccttcgtcgcagccgctgccaacagcatgggcttggcgatgattggtggtggctcgctggacgaggcactggtgcaactggaaagtggtgccgctgataccgccatcgtgatggaaaacgatctctatcgtcacgctccggcggccaaagtggatgccgcattggccaagatcagtaacctgatcgttgccgatcaccagcgcaccgccatcatggacaaagccaacctgatcctgtctgcggccagttttgcagagagcgatggaaccttggtcagccaggaaggccgcgcacagcgcttcttccaggtctacgacccggcttactacgatgatgccaagaaaaatatctatagcgtgatgttggaaagctggcgttggatgcactcgctgcactccacctacaccagccgccaggttgactggactcagctagatgacgtgattgccgcctgcgtgagcgcattgccgcagttacaaggtattgtcgaagctgcaccagatgcgaccttccgcatccgtggtcagaaactggcccgttcaccgcaccgctacagtggccgcaccgcgatgcgtgccgatatcagcgtgcatgaaccgcgtcagccgcaggataaagacaccatgttcgccttctcgatggaagggaacaacagcccgctggctgaccgtcagcagatcccatttgcctgggctccaggttggaactcaccgcaggcatggaacaagttccaggccgaagtgggtggcaaactgcgccatggcgatccgggtatccgcctgatcgaagcaggggagggcaacctcggttacttcaccgctatccctacggcgtttaaagccgaaggctggcgtgttgcgccgtattaccacctgtttggcagtgacgagatgtcacagcgctccgaagtgatccagcagcgtatgcctcaggcctacgtgatgatcaacgttgccgatgccgcgcagcttggtgtcaatgccggtgcctgggtcgagttcagctgtgccggtcaaacgctgcgtttgccggtacgcctgagtgaaaccctgagccaaggccaggttggtttgccgctcggcttgccagggatcccgccggtactggtgggtgcgaaggttgaaaatctgcgggaggcggcactatgagctggttgacacctgaggtgatcgacatcctgatcgccgtgttgaaagcggtggtgatcctgttggtcgtggtcacctgcggggcatttatgagcttcggcgaacgccgtctgctggggctgttccagaaccgttacgggccaaaccgtgtcggctggggcggttcgctgcagctggtcgccgacatgatcaaaatgttcttcaaagaagactgggttccgaccttcgccgaccgcatgatctttacgctggccccggtgattgcctttacctcgctgctgttggcctttgccatcgtgccggtcagcccgacctggtcggtggccgatctcaacatcggtattctgttcttcctgatgatggctggcctggcggtgtatgccgtgctgttcgccggctggtccagtaacaacaaatactcgctgttaggcgcgatgcgtgcttcggcacaaaccctgagctacgaagtgttcctcggcctgtccgtgttgggcgtggtggcgcaagccgactcgttcaacatgcaggcgattgttgaatcacaggcgcacatctggaacgtcattccgcaattctttggtttcattacctttgcgattgccggtgtggcggtatgtcacccccacccatttgaccagccggaagccgagcaggaactggccgacggttaccacattgaatattccggcatgaaattcggtctgttcttcgtgggggaatacatcggtatcgtgaccgtgtccgccctgattgtgacgttgttcttcggcggttggcagggtccattcctgccgccattcatctggttcgcactgaaaacggctttcttcatggtgatgttcattctgatccgtgcttcgttgccgcgtccgcgttatgaccaggtgatgtcattcggctggaagatttgcctgccgttgacgctgctgaacctgctggcaaccgccgcggtcattttgtacaacgctcaataaggggtgaataaaccatgacattgaaagagttagtggttggtttcggcacccaggtgcgcagcctttggatgattggcctgcacgccttcgccaaacgcgaaacccagatgtatccggaagaaccggtttacctgccgccgcgctatcgtggccgcatcgtgctgacgcgcgatccggacggtgaagagcgctgcgtggcctgtaacctgtgtgcggttgcctgcccggttggctgtatctccctgcaaaaagcagagcagaaagatggccgctggtatccggagtttttccgcatcaacttctcacgctgcattttctgcggtctgtgcgaagaggcttgcccaaccaccgcgatccagctgacgccggatttcgaaatgggtgagttcaagcgccaggatctggtgtacgaaaaagaagatctgttgatctcggggccgggtaaatatccggaatataacttctaccggatggccggtatggcgattgacggcaaagccaaaggcgaagccgaaaacgaagccaaaccgatcgacgtcaaaggtctgttgccttaaggagccagcaagcatggaaattgccttttatctggcagggttcattgcgattatcgcgaccattcgcgtcatttcgcataccaatcctgtgcatgcgctgctgtatctgatcgtctctttactggcgatctcggcagtctttttctcactgggtgcctactttgcgggtgctctggaaatcatcgtctacgccggtgccattatggtgctgttcgtgttcgtggtcatgatgctcaacctcggtaacgcggtgcagcagcaagagcgcgactggctgaagccttccgtctggattggccctggtctgctgtcactgatcttgctggtggtgctgattgtggcgatccgcagcgtgtccgatcagggcatcaccggtgagatggtggacgccaaagcggtcgggatcagcctgtttggtccttacgtgctggcggttgagctggcttcaatgctgctgttggcgggcctggtcgttgccttccacattggtcgtgagcacaaaccgggtgaagtgttcagtaataccccggcaagcagcgaaatggcgaaaagaaaatcggaggagcaagcatgatccctcttcaacatgggctgatcctggcggcgatcctgttcgtcctggggctgaccggcttgatgttacgccgtaacctgctgtttatgctgatcagtctggaagtgatgatcaacgctgcggcgttggcgtttatcgtggcgggtagctattggggccagaccgacgggcaggtgatgtacatcctggccatcagtctggcggcagccgaggccagtatcggcctggcgttgctgctacagctctaccgtcgtcggcataccctggatattgacactgtcagtgagatgcgcggatgaacctattatatttaactattctgctaccgctgatcgggttcctgctgttggcattttcccgtggccgctggtctgaaaacaccgcggctaccgttggcgtagggtcgattggcctggcggcactggtcacagtgtatgtggcgatcgattttctgggtcaaaaagccgctggcgtgcagctgtatgagcaaagcctgtggaactggatgagcgttggcgacttcaacgtcggcgtcaccctggtgctggacggcctgtcgctgaccatgttgtcggtggtcaccggcgttggtttcctgatccacatgtatgcttcctggtacatgcgtggtgaagagggctactcccgcttcttcgcttacaccaacctgtttatcgccagcatggtggtattggtactggcagacaacctgctgctgatgtacctgggttgggaaggcgtgggcctgtgcagctacctgttgatcggcttctactacaaagatccggccaacggcgcggcggccatgaaagccttcatcgtaacccgcgtgggcgacgtgtttctggccattgcgctgttcatcctgtaccacgagctgggtacgctgaacatccgtgaactgatggtgctggctccgcagaaactggcggttggcgatacggcgttgacctgggcaaccctgatgttactgggtggcgcggtcggtaaatcggctcagttgccgttgcaaacctggctggcagatgcgatggcgggtccaaccccggtatctgcattgatccacgcggcaaccatggttaccgcaggtgtctacctgattgcccgtatgcacggcctgttcctgatgacgccggaagtgctgaatctggtcggtatcgttggtggcgttacgctgctgctggcgggctttgccgcgctggtgcagaccgacatcaaacgcgtacttgcctactccaccatgagccagattggctatatgttcctggcactgggtgtgcaggcatgggatgcggccatcttccacctgatgactcatgcgttcttcaaggcgctgctgttcctgtcctccggttcggtgatcctggcctgtcatcatgagcagaacatcttcaagatgggtggcctgcgcaagagcattccgctggtatatgtatgcttcctggtggggggcgcggcgctgtctgctctgcctatcgtcaccgcgggcttcttcagtaaggatgaaatcctggcgggcgctatggcgaacggccacgtcaacctgatgattgccggtctgattggtgcattcatgacctcactgtataccttccgcatgatcttcatcgtgttccacggcgaagagaaaatcaaagcgcatgcgggcaaaggtattactcaccacctgccactgttggttctgatggtgctatccaccttcgtcggcgcgatgattgtaccgccgttgcagggtgtactgccggaaaccactgaactggcacacggcagcgttctgacgttggagatcgcctctggcgtggtcgctatcgtcgggatcctgctggcagctgcgctgtggctgggccaacgtcgcctggtaaacagcatcgcgaacagtgctccgggtcgtttcttctcgacctggtggttccatgcctggggcttcgactggctgtatgacaaagtgttcgtcaagccatacttgggcatcgccaagctgctgcaaagcgatccgctgaactcgctgatgaatctgcctgcgctgttctcccgctgggggaaccgtggcctgacggtgagtgagaacggtcagatccgctggtatatcgcgtctatgggtgtgggtgcagtgctggtactggctctgttgattttggtttaactgaataatttaaacagacgcattttgggttcggcccttgtcgaacaagggcccgatacaagttttttagattattcatataagggacacaaaacgccatgctattaccttggctaattcttatcccctttatcggcggtctgctgtgctggcagtgcgagcgtttcggtactaaggcgccgcgctggatagcgttgatcgcaatggggctgacgttggcgctttctctgcaactgtggttgcaggggggctattcgttgataaaaccgcagggcgtgccgcagtggcagtctgagtttatgttgccgtggatcccgcgctttggcatcagcattcacctggcgctggacggcctgtcactgctgatggtagtgctgaccggtttcctgggcgtgctggcgatcctctgttcctggcgtgaaatccagaagtatcagggcttcttccacctgaacctgttgtggatcctgggcggcgtgatcggcgtgttcctggccatcgacctgttcctgttcttcttcttctgggaaatgatgctggtgccgatgtacttcctgatcgccttgtggggtcataaggcatcggatggtaaaacccgtatcaccgcagcaaccaagttcttcatctatacccaggccagcggtctggtgatgctgattgcaatcctgggcctggtattcgtgcactacaatgcgaccggtgtgtggaccttcaactacgaagatctgctgaaaaccccgatgtcgcacaacgttgaatacctgttgatgctgggcttctttatcgcatttgcggtgaaaatgccggtggtgccattgcacggctggttgccggatgcgcatagccaggcaccaacggcgggttctgtcgacctggcggggatcttgctgaagacggcggcctacggcctgctgcgtttcagcctgccgctgttcccgaacgcgtccgccgagtttgcccctatcgccatgtggctgggtgtgattggtatcttctacggtgcctggatggcgttcgcgcagaccgatatcaaacgtctgattgcctacacctccgtttcccatatgggcttcgtactgatcgccatctacaccggtagccagctggcttaccagggcgcagtgatccagatgatcgcccacggcttgtctgccgccggtatgttcatcatctgtggccagttgtacgagcgtctgcatactcgcgatatgcgtcagatgggcggcctgtggggacgtatcaagtaccttcctgcgctgtcgctgttcttcgcggtggcaaccctggggatgccgggtaccggtaacttcgtcggtgaattcatgatcctgttcggcagcttccaggttgtgccggtgatcaccgtgatttctaccttcggtctggtgtttgcttcggtttactcgttgatcatgatgcagcgtgcctactatggcaccccgaaatctgatcaaccgttgccgggcatgaccgcacgtgaactgtttatcattctgctgttggtggtactgctggtgctgctgggtgtttatcctcagccaatcctcgatacctcaagtgcggcgatgagcaacgtgcaacactggtttggtccgtcagtttcagcaatttcaacaacaaggccgtaattcgccatgacaataactcctcaacaactgatcgcactgttaccgctgttgatcgtcggattgacggtggtggttgtgatgctgtgcattgcgtggcgacgcgaccactttatcaacgccaccctgacagtgatcggtcttaacctggcgctgctttcactctactttgttggccaggtaggcccaatggacgtcaccccgctggtacgggttgacggttactcgatgttctataccgggttggtggtgctggccagtctggcaacctgtaccttcgcctatccatggctggtaggatacccggataaccgcgaagagttctacctgctggtgctgattgctaccatgggtggcattctgctggcgagcgccaaccacctggcttcactgttcctgggtattgagctgatctcgctgccgctgtttggtctgataggttatgcctatcgccagaagcgttcgctggaagcggccatcaagtacatggtgctgtctgcggcggcctcgagcttcctgctgttcggcatggcgctgctgtatgccgaatccggtgacctgtcactggcaggcctgggcaagagcatgcaggagaacatgatgcatcagccgctgatcctggcaggcatgggcatgatgatcgtcggtctgggcttcaaactctccctggtacctttccaactgtggacgccggatgtgtatcaaggggcgccagcgccggtctcaaccttcctggcaaccgccagcaagattgcgatcttcgccgttgtgatgcgtctgttcctgtacgcaccggctgcggacaacgaagcgctgcggatggtgttgtctatcatcgccgtctgctcgatcctgttcggtaacctgatggcgatcagccagaccaacatcaagcgactgctgggttactcctcgatcgctcacttgggttatctgctggtggcgctggttgcggtgcaaacccaccagctgtcgctggaaaccgccggggtttatctggccggttacctgttcagcagcctgggtgccttcggtgtggttagcctgatgtccagcccgtaccgtggcccggacgccgactcgctgttctcctatcgcggccttttctggcacaagccaatcctgtcagcggtgatgacggtgatgatgctgtccctggccggtatcccgatgacgctgggctttatcggtaagttcttcgtgattgcgatgggcgtcagtgctcacctgtggtggttgaccggtgccgtagtgctgggtagtgcgatcggtttgtactactacttgcgtgtgaccgtcagcctgttcctcagtgcgccggaaacgctggttcgtgatacgccaaacaactgggcgttgaccgccggtggtgtggtggtgctgatctctgccgcgttggtgctgttgctgggtatctacccgcagccgctgatcacgctggtgcagatggcacagccgatgttctgattgatctcgagctagacaacaagggtcgccaaatggcggcccttgttttttgtgggttagacgctgttaaacgagtcttccagttcttgaactatcgcgcgtattcttgccgtgtgttgcagatccggatgtaacaccagccagatatctacccagtcctgattctccgggaggatacgcaccagatcgggatcgctatcggccaggaagcaagagagcaggccgatgcccaacccgttgcgtgttgccgaacgcagtaacagctgtgagttgcattgcagcaccacatttggctcatttagcgcttcgccgccgaagttttcccaatggcgcggcaccaggtcgcgtgggaacatcagcaaatcgtggccgcgcagatggtcgcctttactcggcgttccgtgttggtccaggtaaccctgcgtggcatataatcccatctcaatagttgccagacgtttgatcaccagttcatcagattcagggcgagcaccacggatagccagatcggctccgcgataggagatgtcggagatattgagtgccgtcactagcgtgatggtgatatgcgggtatttctcgcgcagccgtttcagtgccggtatcacaaaggcctcggccaaggtatcggtggtggcaatgcgcacctcgcccgccaggctttgatcgccgctgctggctttacgagcgatagcctgaaccgcattttccatcgccagcacttctgccagcatggcttcacccagcgggctgagcgagaaggattttggcgtgcgaataaacagctttgaacccaacgcctgttcgaaagcggtgatccgccgcccaacggtagcttgatcgacgtgaagctcatgggcggccttgcgtaacgtaccgcagcgtgccaccgccaggaagaagcgtgcatcatcccaattcattgtgcagtgtccttggtggcatccgatttattttgaccgccagcggcggttgagagagttattatctggtaagtggtaagtaaatgcatctgcgtgaggttgtggagcaagcttatttgtagcaggcaatccattttgcgcaaaaatactggtattcttggttggtgtcgctaacacatttccgacggtgaaagccgccgagcaagggattatctgcaggccggctgggccgcattctggggaaatcatggttgctttatggatggtcgctgccagcgtgttcttcgcgctgatgggggcctgcatcaaactggcttcggccaaggtcggtttcttcgatattattttttaccgctctctgatcaacgtggccatcgtggcggcgctgataaaaatcaaaaatatcggttttcgtacccgccatcttggcttgcacatgaagcgtgccgcgattggcaatgcggccatgtattgcggcttctatgcgctgatccatctgcctatcgccaccgcaaccacgctgggctataccaatccgattttccaatcggtgatcaccttcgtcacggccagaggtcaactgaccggcaggttgctgttctcggtgctgctgggctttgtgggcatcctgatcctgttgcgtccagatgtaccgagcggggaatataccgccaccctgattggcctgctgtctgggttgctgacggcgttggcctatttcaacgtcggcaaactggtgcgtaccggggagcctgagctgcgtgtggtgttttacttctcgctggtcggaaccttgttcggcgtggtgatgagttcgattgtcggattcgcggcgttggatgcgaccagtttgctttacgtctgcgctatcggtgtattcggcagcctggggcagatcaccatgacccgcgcctatggcggtggcaatgcggtcaccgtcggcattctttcctacagcacgatcattttctccacgctgctaggctacctgatttttgcccagaccctgtcgtttattgccgcggcgggcatggtgctgatcatcctttccggagcgttggccattttgcgtcgtgcacccgctaaaaaggtagcaacggcttcggtgtgattttgccgccggccacctgcaacaatgcatcatagtgctgcattgttggtggtttgggcggtcagctctgaacggtatgatgagcgcctgatattttgcgggtgaggtgatttgcctgcgtatttagggagaaaatcatgaccgacggtgtagccgctgataaaaccgcgcgagccaatacgacttcctcggctggagccattgtgctgtttctggcactggcattgatgtcggcactgctcaacagcagtgcgccaacgccgctttatcccttgtaccaacagcaactggcactgacgtcggtcagcttgaccctgatctacggggcctatgctgctggcgtactgatttccctgttcgccgtgggcaacctggctggcaaggtaaaagatttacgcagcatgatcgtcccggcgctactggtggtgttgctgggggcattgctttttgccctggccgattcattttctctgctgctgatggctcgcttgctggccggggtaggcacaggggcgttgaccggtgcggcaaatattgcgttggtgcgttttggcccagcggacggcggcaagcaggcggcgttaattgctaccctgtcctttactgccgggttggcattggggccgatttttagcggtatagcgttgcagaccggttttcataccacctcaatgccgtttgtgatcatcatggtggtagcaacgatggccgctttggggattatgctgagctggcctgcgcgcgtggtggtcaaagctagcgtcagtttggcagaggaggcaggggcaggggaaaataccttggctgcgggcctgcgtgcgaccgggagccgattcttggtgtgtgccggtgcgctatttatctgctgggcattggctgccagcattctggctatcggccccaacgtggcggaaacgctgttgggcatgcaaaaccgcagcagtttcggctacgtgattgcggtctacctgctgattgccggagccagccagatcctgagccgccaaattaatgcgcggcattcgctgatgtttggctgcctggcacaggcgttagcagtggtggtatttgccgaagccattcagatccattcgctggggctggccgctgcggggatggttattgccggttatgcttacggagccatctttgtcggcagtgcgacactggttaacctgatttcacccaaagccagccatgcacgcctgatctcactgttctatgtgattgcttatgttgccaactgggtgcctattttgcttggcagtatcatcgatcatgccagcctgcaactggcggttaacctgctatttctggtcagcgccatggtgtgtgtagggttgggcatatgggttacgcgagtgggcttcccgcgctgaacctggttattttttaacgttgctggtcgatggtagatcggtattaccgcattaactcagtaatgtggctacaggtattcacgccttgcatgatgaaaaaacacgctatttttgtgattaaaatctcattattgtgattttcatatatcaaattgcattttatatgtgatttttatcacatatagcggtctggtttcgcgtaaactaggtggattaattttagcggatcaggattatgaacgtcatttttgccattgcggtaactaccggtattctctccggcgtatggggctgggttgccatcagccttgggctaatcagttgggcgggctttcttggctgcacggcctattttgcctgtccgcaaggtggcctcaagggcctggcaatcagcacactgacctgtttgagcggcgtgttctgggcgatggtcattattcacggcagcgcgttggaacccgcctggagcattctgggctacctgctgactggcgttgtcgccttcctgatgtgcattcaggccaaacagcaatggcttggttttgttcccgggacttttattggtgcctgcgccaccttcgccggtgacggtaactggtcattgatcacagcctcactgctggtcgggctattgtttggctacgctatgaaaaacagtggcttgtggctggccgcacgccgtaaatccccctctgtagcgctggccaaacaggcctccaccgacgcctgaaagggcgtcagtttcttgtcctgcctcctttttcatcaacattccgatggcgtgtattcaggtcgtgtcctaccatgggactacgaccaagggttgttgatagctaagcaacgttgaattgactactaacggagagcttaaagatggcgaaaaaccgagacgagaaccaaacgacgctggatgacgatctgagaatgctgagcgacacgctacaagacgtgttggattactctggcgatcgagccgatcaggcctatacggatatcaaatcccatgccgagcgggcgctaaaagacgtaaagtcgcgcctggcgaatagctcggagtgttactacgtgcgggcgaaagaggtggcatgtcgcgccgatgactatgtccgtggcaaaccttggcacagtgtcggcattggtgccacggtaggtttggtgcttgggctattgctggcccgtaagtaacaccaatgagcagcggtagctgccgaatagtgtcacaggaaggagtcatgcagaacgccgacacgccgtaaacccgtccctgggggctcgcaatcgcgcatccctgcgcttaacggtcggctaacctgcaatgactccctcctgtctcaagcttcgggtgtagcggtattaaacaccgctatttagctactgtgtcccttattgttttcccagaattacctccacctggtaggttttagcctcatcagccaagttaatcaccgcttcctgctgcaacacaccatcaataatcacctgcgtttctccttccccttggcgcagggtgaagtgatattcgctctccccttcacgataggttagggtgaccggcggccaatctgccggtaagcgggtgtggatggaaagcgtattgccgtggcgttttagccccaacagcgactcgacgatcagccgatacatccagcccgctgagccggtataccagctccatcccccacgcccaacgtgcggggcgaccgcgtaaatatcggcagtggcgacataaggttcgaccttgtagcgttccgctgcggtgctatccaggctgtggttgatggggttaatcagcgccatcaattcccaggcgcgctcgatattgcccatctcggcgaacgccatcaccgcccataccgccccatgagtgtattgaccgccgttttcccgcacgccgggcaggtaaccccggatgtagccagggttcgggccgttgccgtcaaaaggtggggtcagcagtttgatgatgccggcctggtcgtccaccaggtgcttatccagagattgcattgcctgtgcgctgcgatctttgtcacccgcaccggaaaggatcgaccaactctgggctatggcatcaatgcggcattccgccgcttggtgtgaacccaggggttctccgctatcgaagtaaccacggcgataccattcgccatcccaggcgttattgtgcaggttggcgcgcagtttttctgcttcctcgcggcacagttccgccagctccagatcgccgcggtgggtggccagtttgccgtagcgttgcagaatatagaacaggaagaagcccagccaaacgctctcgcctctgccttccaatcccaccatgttcatgccgtcgttccagtcaccggcccccattagcggcaagccatgctcgccaaaggtcaggccatgcttcagcgccctggccccgtgcagatacaggctttcctgtttcgggctgatgcccggctgttcataagaagactcctcacctggtgccagtatacgggcctccagataacccacctgttcttcgaggatcgatgagtcgtccgtcgcgtcgaggtagtggcaaatcgccaacggcaaccacaggtaatcatcagagcagcgggtgcgcaccccgttgccctgtggtggatgccaccagtgctgaacgtcgccttcaacaaactggcgcgaagcacacagcaggatctgctcacgcatccgctcaggcaaggcatgcgtcagggccaaggtatcctggagctgatcgcggaagccaaatgcgccgccggactggtaataaccgctgcgtgcgtgaatgcgacaggagagggtttgatacagcaaccagccgttagccagcaggttaaccgctggatgaggcgtaccgatctgcaccttgttgaggatcttgtcccaatgggcatcgacctgctgcaattcgtgttgcaaagcctcctcgttgagatactggcgcagcagggattcggcttcgtcgccatcctgtcccaggccaagcgcaaacacaaagctgcgctgatcgccatcgatcatgctgatggccgattgcaccgcgccacagggatctaatccggccccggtcttgccggataaccgccgcagcttaagcacggcaggatcggccaacgaaccgttacggccaatgaattcccgcctatcgccagtgactgaacaatggacgccggtaacgccaaagaacgcggtgcgtggcgatccgctgctggtgtaatggttggtggcgaggatgccacagccgccaggcggggtggctacgcgggtgaccacgtgcatggccgatttctggcgtaaatcaccgaggatcagctcggcatagccggtagtcgaaagcttacgcgtacggccagaggtgttggtgagcgtcagaaggaacagttttaccggggcgtctttggcaaccagcatcgtcaactggctgtcgataccgccttcccggtgttcaaacacgctgtaaccaaaaccgtgacgcgtcaggtaatggccgcgcccacgggcgggcagcggcgttggtgaccagacgtgaccactttcttcatcacgcagatagaaagcctcaccgctgcgatcgctgaccggatcgttatcccaaggcgtcaggcggtattcatgcgcattctcataccaggtgtaggcttggccgctttcagagatcaccgagccgaacatcgggttggcgataacgtttgaccacggagccggcgtcaccttgctttcgttcatggcgattacatattcgctaccatcctccgagaatccgccaaacccgttgtagaactggagcttgtcgatgatcggcaactgcggtgaatgcagattacgcggcaaattggccatggtcgccagtttggaggaggcagtcggcggccccaatggctgttgcagcgtttgcggcagttgcaacctttggttgagttgctccgtcaggccaccgcggcggtcatccagatagatccgcgctacgctcagcagcaaggtgtgatcctccggtgacatatgttcactggagcgtacgaagatccctccgggtttgtccgtcagggaagactccatcccggcggcgatcagccccatgatccgattttgcagatcttgccggtaaccaccggaatcctcattgaggatcaccaggtcgaccagcaatcctttcagtcgccagtagttgtgtgcctgaatgagctgttgcaccagcccgatattctcaatgtcggtgacggacagcagcacgatcggcagatcgccggaaatcgaatagccccacaggccggactgtccgcggcggttattgatgatttcattgctggcggcacgcatttcctgcgccgggaacaccaccgcgctggccaggcggttaaacagattggcgtcttcttcgttggcgttcaactggcgcaacaccacctgactgtgcgaccaggcgagttcgaaaatacggtcggccatatggcggtcgcgggacttctccaacatcgccaggctggtggcgcggtcttcacacacgccgtagaagatatccagcgtcagcggcacgttgggttccagccggatccgctgacggatggcgatgatcggatcgatcaccggcccggcgctattggtcaggggttgattctgatatagcgcctgcgggttggctgccgtgcggccacggccgataaacttggcccggtcggtttcaaaggacgttttgctgctggaaccttggaccgacatcatatgcagcaaccacggcgatttttctttcggctcacgcgggcggcgatggcacagaatggcatcctgttcctgcaacagctcggtttggacaaacagattactgaacgccgggtgggccaaatcgttgctggccggggccagcaccacttcagcatagctggtgatctcaatggtccgcggctgtttgcctcggttcaccaaggttaagcgccgcagttcgatgtcgtcctcaggggagatcaccacctgggttttcaccgacagcagcccctgcttgcgttggaattctgccccggcatcgttgaagacggcgcgatagccgcctttctcggtgtcgccggtagggtgccaggtattgctccacacttcaccggtttgcggatcgcgcaggtagcagaatgcgccccagttatcgcaggtggcatcctcacgccagcgggtcagcgccagattttgccagcggctgtagctgccgccggtttgggtgatcatcagatggtagttggcattcgacagcagctgtacttccgggatcggtgtatccacacgggtgaactcacgcgcggcgaagctggccggtgtaatcgcgccgtcatgggtttcgaagtggcggcgggtgctgtacagctcaaccgcatcaggcacccgttcctgcaacagcaagcgggttgactggaaggcggggtaactggcaaagcgtttcaccatcggtgcatccagcagcaggtgtgacagcgccaggaaactcatcccctggtggtgagccatataggaacgaacaatgacatacaactgcccccggctgaggcgtgaagtggtgtagtccagcgcttcatagaagccataacggcccttagcaccgtttttttccagctccaccaggttgctgcaggcactgtccggatcgacaatcagcgccatcatggtggcgtaaggggcgatcaccatgtcgtcacccagcccacgccgcagccctaaccccggcacaccaaaggcgtgatactggtagttttgcaaagcgtcaaagccgaagtaaccggactcggaaatcccccacggtacaccgcgctccttgccccaggcaatttgccgctcgactgcagagcggcacatttgcaccagcaacgtatcgggataggccggcatcaccagttgcggcatcaggtattcaaacattgagccgctccaggacatcagcgctggctccttgtcgatcaccgtaaacagcctgcctaacgcaaaccagctacgttgcggaatttggttggtggcaatcgctacatagttggtcaggcggatttccgaggccagcagatcgtatttaccactgtcggcacggttttgatcgcagttgaaaccgacggtcagtaaatgggtggcttcgtcatacaggaagctgaagtccatttgcgccattgctgtcaggcgccgtgccaactgcgccaactgttcgaggcgttccgctgccaactgctgcacggcatccaactgtgtttgctgttcagtcgacaacgttagccgttcaggtgggttggccaaccaatgcaagctagggatttgttccagctccggcatgctgtcgctcagccagctaaaccataatgcccattcggtgcacagatcgttgagctgctggtgcaggttaccggcccagcgtttgacctcgtcgccctgttgcagagcaggttcctgcaatccgttacagtggttacgcatttcattgagttcagcctgtagtgccgccggatgggcgttttgcgcctgttcccagtgtttacgcagcttggttaatcctttcggtgcggcgttaccccagtgctgctccagtatcagcaacgtatcttccactccggccagaatgcgggctggttcgataactggctgcatagtcaatgctggcaggccagagctgagggtcagcaggtggcccgcgaaattaccgctatccacgcttgaaacataacgtggattcaggggctccagggtgcgcgtgtcgtaccagttgtacaggtgaccgcgataatgctccatgcgatcgagcgtattcaacgtcagggtaatacgctgcaaggctgcactgagggtgatatagccgaaatcataggcggtgaggtcggccaacaacgccagcccgatattggtgggtgacgtgcggtgcgccactaccggctctggaatttcctggtagttatccggcggtagccagttttcctgctgggtgacaaaggtagcgaaaaactcccaggtttcgcggctgctctggcgtaggaagcggcgctggcgatcgtcgatggctgttttgctgcgctgtggctccaggctgagcgaataaagcaggtacggtgacaggatccacaaggcggctagcgggatagcggctaacagcgctatcggactggaaaaggcggccaacagcaacaatgaaacgccagcaaacgggttgatccacaggttgcggtaaaaattcgccagcgtgacggtcagatggtgtttggatcggtcgaagctggtccactcttgcagattacgtttgctgatcaacaaacgccacagggtgatgccaatagccttcagactgtaccaggcttcatgaggtagctcggccagacgcagaccaatctgacacagccgatgcagtgaacccttcagtgccagctgtaagtgctgaataacgggccgacgcgggggcttacgcaccacatcctgcaacagcgccagcagcgtgggcaacagcagaataatgacgaacaccgccaaccagtatgcggtatccgatagccaggttaagccaaagaacagcagcaacaggaagcagggggctaccaggctgcggcgtaggttatcgaacagtttccagcgtgacaaagggcttaatgggttagcggcccgcgaaccgtcttcagtggtgacccggggcagcaaccagttcaatagctgccaatcgccgcggatccagcgggtgcggcgggcaacatcgaccagatagttgctcggatactgctcatagagcaagacgtcgctcaataaaccggaacgggcatagcaaccttccagcagatcgtggcttaacaccaggttttctgggcaggtgcccttcaggctgtgggagaagacgtcaacatcataaatccctttgccgataaaggagccttcgccaaacagatcctgatagatatctgaagccatctgggtataaggatcgttgcccggcgtactgctgcaaagggcggcgtaacggctctggccataagtggggatctcttcggccatgcggggttgcaggatggcataaccctccaccacccgttgcagcttggcatcatactggggttgattcaggggatgggccatggcggcgatcagccgatgtgcggtttcacgcggtagcacggtatcgctgtccagggtgattacgtatttgacgtttttcagcacctccagcccttggccaatctgggtggtaaacgcattgccacggttgcgcagccaatcgttcagcgcgttcagcttgccacgtttacgctccaaccccatccagctctgctgtttctcattccattggcgatcgcgatggaacaggaaaaagtggcttggcccttcgcaggcatactgcgcattgagctcgctcatcttttggctggcataggccagcagttcggcatcgtcggggtgttgttgtcgaggcgagtcattaaagtcggtgagcagggcaaaatgcaggtgcttcatggcattgcccaggtagcaaacctccagcgtgttgatcaactggtcaatgcccggcttgctgcttatcagcgtaggaatggcaaccagcgtgcggaactctgccgggataccacaggaaaaatccagccttggcagcggctgcggagaacggctacgggtggtgatctcactgagcagactaatgacgaactgagcgagcaccatccccaaggggaacagcaagatcaacaatccccaggtgagcccggtttggtgggcatggcgtaacagcaaggcccagcaggccgttgtgagcaggctgatgctgcccagccaggaaagcagtggggattggctgagcgcctggcggatgcgcgtaatacggctaagccgaacgtcgagctgttgttctaactgcgtgcgcccatggtcaatcaggtaatagccgatgtgatgagtacgtggatcgttgcggggatcttcggcggcgatccgtgccatattcagagcgtgttgcgctacttcaacctcgttataagaacagtggcgagccagcctctcgatcacatgacgatagttgtctcgggtatcgaaatgcattaaaggataaatcccggttgggtcttcgcgcagcgtctgatcgaccttgctcatggtctcaacaaattccgcccaatccatttcactcagttgccgcaggccagcgatactgttgctgacggaaagttggctgaccgcaagttgttggttgaaacgatggataagctcatcggaggtcaggctgacttcggccagtcgttgctcaacccaggtcagcggtagcgccagcatggtcccgtgcccctgtagacgacgcaccagttctgctacgaaggcgctggtgcggggcgggttggagcgtgccatatcggcaatgacaatgatcagattggccggatcgttttccgccgactccagcattttggtcacccaactatcggccaggctacgctcttcttgcgcctgggccacttctaccgccacgcggcgcaggttctcaatcagcgccagcctcagcatgcccggcaacgcccaaagctcacccagggtcagattggcctctttttggtaggcggcaatatagcgcgtcaggctctcggcatcccatcgcccgtcgccgtgagcaatagcttcggtggcgatatcgaaaattcgtgggcaattgtgcggggcggctaactgtggcagcccacgcccgaaggttttcggcagatggtgccgaacgacgcggatctgctcctcgataagataaaaattatccagcagccagtcgcccgccggagtcatagtgtttttcttatcgttgcttaacctgcggcaactgtccgtcaatacccgctcgttgttatcgagacgtttgagcaaatagtagggcgttttatgggttgccagtttatgggagcgtgccaggcgctggccgtagcgttccatttgatcgaccgaaaacagctctgccttgatgttgctggcgggaggggtttctgcagtagcccgattatgccgtaagggcaaccgggccactttgggacggcgacgctgcttctttaaccaattgataagtatttctttcacgcaaaaagctccttacatctgacccaaaggacagcgggttaataccgttgggaggctgtgaacatcttgatttaactatcgatttgatatgacaagatttcactgcggcaggaacatgacttctaagtatagttccgtcgcgcgcgtgtggtcgttttttaatcttaaacttcaattttaataaataattagcggcggaaggtatgggttaataagcgctttttttccgcccgtgagggttgatttaccgtataattccccacatagcgtttggttaatgaggtggtagtggaacaactttcgggattgctgcggcggctacgtcagcagcttgggcacggttttccccgtgaagccggatttcggcagcttacgctggtggttcccggccatctgagcgatgtgctgctggagtggctggcggcgcaggtgctgttccctcaattctactggcgtcatcgcgaagggcggcaggaggcggcggtgtgcggcgctttgcggcagttttcacacccttcgatggcgcaggcatttgtgaatgcctatcctgcggcccgtttatgggggctgacagcctttgacggtgacgcccagctgtttttgccgcgcctggaaattcttaatcgccaaggcaaatgtgaactgacgctaaacctgttttctgaagaggcattgagtgatgacgcccaagcggcgcttgcctggcttgaaaatctgctggtgatcaaaccgatcgagaatttacaggtgaaagtgctgtcggtgcagcatcagccggaacgttccgggtgggaaatcatgctgcgcgatgcgctgaaggcgataaatcggcagcagatggataaggtggtcttggcgcgcagctcagtgttgacgctggagagtccgttgtttgcccctgcgatgatggccgccagccgcagggtgaatcaccaatgctaccactttatgctgcgctttgatgcacattccgcatttcttggctccagcccggaaagattgtacctgcgtgagggaaaacatttgctgaccgaagcgttggcgggcacggttgccaaccatcccgatgagcggcaggcccaggcactggcccagtggttgctgcaagacagcaagaaccaacaggaaaacctgctggtggtcgatgatatttgccagcgtttgcaaggcggtgccagagcggtcgatgtgttgccaccagaagtggtgcggttgcgcaaggtacagcatctgcggcggcgtattgaagggcaactgaaccagggtgatgatgccgattgcctgcaaagactgcagccgacggctgcggtggccgggttgccgcgccaggcctcgcgtgagtttatccgccagcatgagcctttttcccgcggttggtatgccggctctgcgggttatctttctgcggcacaggctgagttctgcgttgcgctgcgttcctgtcagatcgaggatgctcgggttgagctgtatgccggtgcggggattgtggccggttccgatccggcgcaggagtggcaagagatcgaaaacaaggcggcgggcttacgcactctgttgcagtcagaacattctgggcaggcgcattgagcaggccgatcttcgtgtgtaaacttgttgtgtcttatatgtttcttttttgttctattttggggcgctatttggcatgggtgggtcgaaattgatttattgcaggccccctgccacagggaaatacggcgtttttgcgccagcgcaaaagccgtaaagataattacttatataattcagagttatgatccccggttcgctacctcctttgggtaggcttcggcgcgtaacctctgtttactactgatgagcgaaatatgtcgacaagtgtttttaatcgccggtgggcggcgttgttgctggaaacgctggtccgccatggagtgcggcatgtctgtatcgctccgggatcgcgctccacgcctcttacgttggccgctgccgcgaaccgcgcttttgtctgtcatactcatttcgatgagcggggcctgggccatttagcgctcggcctggcaaaggccacgcgtgagccagtggcggggatcgtcacctcgggtaccgcggcagcaaatctttatcctgccctgatcgaagccgggctaaccggggagcggctggtgtttctcaccgccgatcgtccgccggaattgattaactgcggcgccaatcaggcgatccgccaaaacggcctctactcgagccaccccaccttgaacatcgatttgccacgcccaagcccggatattccggctcgctggttggtatctaccttggacagcgcgatggcgcgcctacggcagggtgccctgcatatcaactgcccgtttgcggagccgttatatggcggagatgaacagctgtatgagcagtggtcggcagagttaggggactggtggcaggatacgcacccttggctgcgtgaaatggatccccatcaggttattaagcagcctgactggtttttctggcggcagaagcgcggcgtgattatcgctggcaggatgggggcggaagagggcgtgcaactggctgaatgggcgggcatgcttggttggccgttgatcggcgatgccctttcgcaaacggggcaaccgttgccctgtgtcgacttatggctggctaacccccaggctcgcgatctgttggcaagcgcgcagttggtggtgcagtttggcagcagtctaacgggtaaacgcctgttgcagtggcaggagcgctgccagccagaggagttctggctgattgacgatctgcctgggcgtctcgatcctgcgcatcatcgtggccgccgtattcgttctaccgttggcgagtggctcgatctgcatccggcgcaacctcgctcaccttgggctggcgatctgtccgcgttggcggatgatgcccttgatgcgacgtcgcaatacctggttaaccggtttggtgaggctcaactggcccatcgcctgcctgagctgttgccggagaacggccagctgtttctcggcaatagcctgattgtgcgcctgatcgatgccttaacccagttgcctgctggctatccggtgttcagcaaccgtggggccagcggtatcgacggcctaatctccaccacggctggggtccagcgtgctaccgccaagccgacgttggccgtggtaggcgatctctccgcgctatacgatttgaacgctctggcactgttgcgccaatgttcggcacccacggtgctgatcgtggtgaataacaatggcgggcagattttctcgctgttgccaacgccggaacctgagcgccagcggttttactgtatgccgcaggatgtggagttcagccaggcggcagccatgttccagcttgattatgcctgcccggaaaactggggacagttgcagcaggcagtggaaaaggcctggcgtcacagcggagccacgctgattgagttgcaggtgccgccgagcgatggagcagaaactctgcaacatctggtgcaaaaaatgggggcaaactgatgctggcttcccgcgtgttacaacaaggcgaaagccaacgcccttggctgatctggctgcatggcttgctgggaaacaacaatgagtggcgggtgatcgcctcgcgctgtgaacagtggccctcgctggcaattgatttacccggtcatggtgattctgccgatcaatcctgcctcgactttgccgacgtcagcaggcaaatcaccgccacgctgcaacagcataatattgagcgttactggctggggggctattcactcggtgggcgcattgccatgtaccatgcttgctgcggcgaagcgcaagggctgcaaggcattgtgatcgagggcggtaatccagggctggagaacgaagatttacgtgcccagcggcgtgcccacgatgccgcctgggcgaagcgtttccgcacggagcggatcagaaaggtgttggccgattggtatttacaaccggtttttgccaacctcagcccggtacaccgcgaggcgctgatcgccgcccgtgccgacaaccatggcccggccatcgccgatatgctggaggcgacgtctcttgggcgccaaccttggctggtgccacaattacaacagttggcactgccagtgatggtgttatgcggtgccgacgatcacaagtttcaggcgttggcgcgtgatgccggtttgccattgcaaaccgtgccagaagcgggtcataacgctcatctggccaatccggcagattttgccgccgcgctcgatgcatttcttgcaaaaaaaggaaccaaacatgctgtatcccaatgaagaacaactgtacgccgcgatcgactggcaggactgctcgggtgatttcgaagacatcctgtatcacaagtccagcgatggcattgccaaaattaccatcaaccgcccgcaggtgcgtaacgccttccgcccgcacacggtgaaggaaatgatcgaggcgatgtcgaacgcgcgctatgacgacggcatcggcaccatcattcttaccggtgccggggataaagccttttgttccggcggcgatcagaaagtgcgcggtgactacggcggctatcgtgatgacagcggcgtgcaccacctgaacgtgctggacttccaacgtcagatccgcacctgccctaagccggtggtggcgatggtggccggatattccatcggcggcggtcacgtgctgcatatgatgtgcgatctgactattgcggccgataacgccatctttggccagactgggccgaaagtcggctcctttgacggcggctggggcgcttcctacatggcgcgtatcgtcggccagaagaaggcccgtgagatctggttcctgtgccgccaatacgacgccgctgcggcgctggagatgggcctggtcaacaccgtggtgccgttggccgatctggaaaaagagaccgtgcgctggtgccgtgaaatgttgcagaacagcccaatggccttgcgctgcctgaaagccgcactgaacgccgactgcgatggccaggccgggctgcaagagctggcgggtaacgccaccatgttgttctatatgaccgatgaaggccaggaagggcgcaacgcatttatcgaaaaacgccagcctgacttcagcaaattcaagcgtaacccgtaatgacggcactaacccgtgttgctgcgatctatcgctatagcctgccgatggaggcgggcgtggtgctgcgcaaccagcggctgaaaacccgagatggcttactgatccatctgcagcaggatgggcagcaagggtggggggaaatagctcccttaccggagttcagccaagagacgctcgaccaggcgcagcaggctaccttggcctgggtgcaggcttgggttgcgggtgaactgcctgtggaaagcgagtggctgtcggtggctttcggcaccagctgtgccttggcagagctggccgggcaattgccaacgcaggccgactaccgcaaggcaccgctgtgcaccggcgatcccgacgagctgttcgatctgttggctgcgctgccgggggagaaagtggccaaggtcaaggtggggctgtatgaggcggtacgggatggcatggtcgtcaacgtattgctggaagccttgcccgatctcaagctacggctggatgccaaccgcagttggagtcgtgccaaagcggatggttttgccaaatacgttaacccagcgtggcgcgatcgcatcgcgtttctggaagagccttgcaaaacccgtgacgaatcccgtgagtttgctcaggcaaccgggattgccatcgcctgggatgaaagcgtgcgtgaagccgattttgtcgtgcaggccgagccgggcgtggcagcgattgtgatcaagccgactttggtgggtagcctggcccgctgccgtgaactggtcatgcaggcgcatcaggccggattggtggcggtgatcagttccagcattgagtccagtctggggttgacacaactggcgcgcattgcgcattggctgacgccgcacacggtgccaggtttggatacgttgaacctgatgcaagcccagttgatacgcaactggccagagagcaccttgccgctattaggcattgataccttggagtgtgtatggcgcagttgagtgattggccgtggcggcattgggccaaacagcgcccgcaggcgaccgcggtcatctttgaacaacagccggtcagttggttaatgctgcaacggcaggtggaagtgttagctgccgactttcagcgccagggcgtgttacccggtagcggtgtgctgctgtgcgggaaaaacagctatccgctgctgttagcctatctggcgcttttgcagtgcggtgcgcgcctgctgccgctcaatccgacgctgcctgcgccgatgctggcggctctgctgccggatctggatatcgactttgctttcagcccggatggcttgcctgagttgccccctggcgcgatcgtcttgtcgccgccgggcgttgatgagtgccacttgcggttgttaccgtgggatgaacaaagactggcgacgttgacgctgacttccggctccagtggcttgccaaaagccgccgcccatagttatgccggccaccttgccagtgccgatggcgtgttgcaactgctggagtttcagccgcaggacagctggctgctctcgttgccgctgtttcacgtgtctggtcagggcattatctggcgctggctggcggtgggggcacagcttgtggtgcgtgaaatgcaacccttggccgatgcgttggcgggatgtacccatgcttcgctagtgccaactcaactttggcgcctgctgtctgaaccgatggccaagcatgcgctaaaagaagtgctgctcggcggggcgatgatcccggtgtcactcacccagcaggccgaggcggtagggatccactgctggtgcggttatggtttgacggagctggcttcaacggtttgcgccaagcgtgccgacgagctgcccggcgttggggcacctttaccaggccgcgaaatacgcctggtggatcaggaagtctggatccgctccaccagtctggcgctgggttattggttgcggggcgagctagtgcccattaccgacgagcaaggatggttccatacccgcgatcgtggcgcgatggagcagggtgaactgcgtatcattggccggctggataacctgttcttcagcggcggggaaggcgttcagccggaagatgtggaacgtgtgtttgccgcgcatccacaggtgttgcaggtgtttatcgtgccgattgacgatgcagagtttggccaacggccggtagcggtggtcgatctggaaggcgagttgacgctggaggggttaatgctttgggcgcaggaccggctggcgaacttccagcggccgattgccgcattggcgttgcccgacgagctaaaaaacggcggcatcaagatttcgcgccgtcgtctacaacagtgggcgagtagccaactgcaggcataatctgtagcgttgcaaaaaaggccgcccgagggcggccttgctattgctgtaaccgattatttcaggcccagggccttggcaacgccgctgccgtaatcgggatgtaccttggtgaacagctcaacctgacggcgttggatctgttctggcacctgcgacagctcaccggcgatacgggtgaacatacgttggtgctcctcggcactcagcagattgaacagcgcacgcggttggctgtagtaatcgtcgtcttcacgatgattccagtgatcggcggcaccttcgatgctcaatggcggttcgctgaaatctggctgctcctggaacaccccaaagctgtttggctcataggttgcgccgttgccgctgttgccatccacccgcatcgccccatcgcggtgatagttatggaacgggcatttggcaccgttgaccgggatttggtgatggttgacgcccaggcggtagcggtgcgcatcgccataggagaacagacggccctgcaacattttatccggtgagaagctcacgccaggcaccacgttggctgggttcatggccacttgttccacttctgagaagtagttatccgggttgcggttcagctcgaagaagccgacatcgatcagcggatagtcaccgtgcggccagactttggtcaggtcaaacgggttatacggggtttgtgacgcttcatgctctggcatgatctggatttgcagtttccagcgtgggaagtcaccgttcttgatggagtcgaacagatcgcgctgcgaactttcacgatctttggcgatgatggcttctgcttcatcgtccatcaggttttcaatgccttgctcacagcggaagtggaacttgacccagaaacgctcgttattggcattgataaagctgaaggtgtggctgccgaaaccgtgcatatgacggtaggatttaggcagaccacggtcgctgaaatcgatggtcaactggtgcagtgattcaggcagatgggagaagaagtcccatttgtacaccggattgcgcaggttggtgtgcggatcgcgttttaccacgtggttcagatcagggaatttcagtggatcgcgcaggtagaacaccggggtatcattaccgaccagatcccagttaccttcctcggtatagaacttcatggcaaagccacggatatcacgttcggcgtcggcagccccgcgctcaccggcaacggtagagaagcggacgaacatctcggtttgcttaccaatctcagagaagatttttgcgcgggtgtactgggttatatcgtgggtgacggtaaaggtgccgtaagctccggaccccttggcatgcatacgacgctctgggatcacctctcggtcaaagtgggccagtttttccaggaaccaaacgtcttgaagtagcatcggaccgcgcttaccggcggtgatcacgttattattatcaacaacgggcgcgccagccgcggtagttaatcctttcttgctcatcaattgctccttactctgttgcagttaagttgatagctcagtttcgggtgctgtagatcttcatcatgttaactaatgaaaaggcctgccctgctgacctccatcaaagacactactagttgtagactcattcgcactcctcggcaaataggcagcacttatcgttgcaattttggcggtgacggatggttatttatttacagtttattgaaaaattaacagtttattgctttaaattagccgggaattgatgacaactcggttacactgacccgtgtgttttttgcggtgatagacatcatcactccttgatgatgaagaatgaaaaggatcaataatgaacaaaactttagtcgcgtgcgcagcaggtttgctgtttgtggctggctctgccaatgcgatcagcgtgagcggtgaggcaggggaacattacaccaaccttggtgtaggcttggggggcacaacggcgggcttggggatcagcggcaactggatccgtagcgatcatgatggtgacattggtagcctgggattgagcttcggcctgccggttgggcctttgacggctaccgtgggcggcaaggccatttatcttagcccggaagatggcaaaaatggcggagcattggcattaggaggcggtctgcaatgggagctcaaccgctatctcagcctgtatggtgaaggctattttgcgccggagtctttgaccagcggggcaaaagcttataacgaggccaatggcggggtgcgcttaaacgttcgtccgttcaatgtggatgtcggttatcgttacatcaacatcgaaggtaaagacggcaaccgcgacaacgcgatagccgatggcccttatattggcgtgggcgtgggcttctaatcctgcctgatcttcaacgggcgccgcataggctgcgcccattttttatgttagccgatggcgggtaacagaccgctggcgatgctgatctgaatggcgatcactgccaccccacagacaaacaccaacgccaacgctggtgtcccgccccagactcgatagctggcctgatgccgacgacgagttttccagaccagcaatgaaggcagcaacagagcaagcacggacagcgcgattgccgcgaacccgagtgccagcacaaaaccgcgcggatagaacagggcgaatgccaatggcggcaggaaggtgatggcaccggtctgcaagcggccccgcacgttatcccggcgtttgaacagatcggccaggaagtcgaacaacccgagcgaaacccccaggaacgacgttgccagtgccaaatcggcaaacaggtgtaccgccagctcgacatgaggcgaggcgaccacgtcgcgtaccgcttgcagtaaaccgttcaacccggcctgttgtgccagaataccgacaaaggtggtggaactgatgctgcccagcgtcgccaactgccagaagatataagccactaacgggatggcactgccgatgatgaagatccaacgcagcttgcggatgttaccgcccatatagttgacgatgctgggtacgctgccgtggaaaccaaacgaagtgaagatcactgggattgccgagagcgccagcccctgttccagcgggagcgtcagcaggttggtttgctggatgtgcggcatcatcagacctagcatgacgatcaggaaaattgacttggcggtaaacagaatacggttgaacagatctaccgaatgggtgccgatgcagacgatcccccctgcgaccaaggtgaacagcagtacgccgaggtaagtcgggaagtcctgagaagtccactggctgatgctgacagccagcagttcgccagcgccgctgatataggctgcggtcagcgcatacatcaagaacatcatgctgaaactggtaagccactggccaccaccgcccagatagcgtttggccagcgttcccaggccggtgtccgcctgctcatgctgataaacttcgaccagcaacagcgcggtatagcacatcaataaccacagcccgaccagcaatgccagcgttacgccaaaacctacgcccgctgccgccaggggcatagccagcatccccgcaccaatggtggtgcctgccacgataaaaacactgcccagcgtacgattcttcacgtttttctctgctattggatgatttataggcgttttcgggggcctatttttagtgcggcagaatagttgattgccgattttgtgtcaaaccgacgttacgtctggtgtacatttaaatttacggttgtgagtgggagggcggcggtaataaaaaatgcctttagacagcaatatcgtccgctgcgtagtgaaaagttgtttacgggcttctatagtggagggatctgaacataagggagagatcaatgttaagggtggagatgctcagtaccggtgatgaggtgctgcatgggcaaattattgatactaacgccgcctggctggcagattacctgttccagcaaggcttaccgatgagcgggcgcgaaacggtgggggatagcctttcttcgctgatcgaaatcctgcaggagcgtagccatattgccgacgtgctgatcgtcaacggcggtctggggccaaccagcgacgatctcagtgcgttggcagcggccaaggcttgtgataccgaattggtcgaacatcctgaatggatcgcccgtatggaggcctactttgcggaacgtggccgcccaatggcggcttcaaaccgtaaacaggcgcagatcccggctaatgcggaaatgctggataaccgtgtaggtaccgcctgcggcttcgccttaacgctgaataagtgccggatgttctttacgccgggcgtgccttccgaatttaaagtgatggtagaagagcagatcctgccacgtctgcgacagagctttactctgcctgagccgccattgtgccttcgccttaccaccttcgggacttcggaaagcgacttggccgctgaactggacggcatgcctttgccgccgggcgtcgtactgggctatcgctcttccagtccgattattgaattgaagttgactggcccacaggttcagcgtgccgcgatggaacaagcctggcagcgagtgcggcaggttgcgggtgacaatacgatttttgaaggaacggctgggctaccggcagagctgacgcaacgcttacagcagcagaacttgacgctggcgctgagcgagcaatttaccgccggcctaatcaacctgcagttgcagagcgaagctgccccgctggccggtggcgaactgctacctgcgcattgctccgaggcattggcaacagtgctggcgcgtgcccagtctttggcgcagctcaccggtgcgcagttggcgttggcggttagcgccatggcaggggatcgtgtcagtgttgccctgcatacgccaaaaggcggtattggccagacggtgagctatcgtgcttcacgtcatggcctgcgtttacgccaggagtcggtcgcgatgctggcgctggatatgctgcgccgttggctgaatggcggccaggtttgcggcaaaaacggctggctggaaattgtggaaattatcgagtagaaactcgttcatggcggtgagatatcccttatggatcataacaatataaggggtattcgctgtgggagtgggttgttacacgctttgcgggtgtttgagactcttcgtgttgggcattgatacccgtcgcctttcaagctgcagcgttgttgactgcgggtgttcacccccttgccgcctagctgcaacttgaaattcttagggtattcagtgtttgatgattattttattgagttagatttccagctcgatatccatggcgggcatgcagcagcagggcaggatctcgccatgattgataaatgccaacggctgctggtggtaagcgacctcacccttcagtaatttcactcggcaggcaccgcaatagccggagcggcattggtattccacctccacctcatgcagttccagcacgtcgagcaggcatttttcaccttcggggcaggagagctgcgtaccggtggcacgcagcgtgatggttggtgcagccacttacagctcgaaatcactcaggtcgtcggcgttgacttcagagtcaatctggccgaccaggtaagagctgacttccacttcctgcggagccacctgcacgttatccgacaccagccaggcgttgatccatgggattgggttggagcgggtagggaacggtgagcccaggccaacggcctgcatgcggatattggtaatgtattccacatactggcacaggatgtctttgttcaggccaatcatggagccgtcgcggaacagatactcggcccactctttctcctgctgtgccgccaggacgaacaggtcatagcactcttgctggcattccatggcgatttcggccatctctgggtcatcggcgcctgagcgcatcagattcaggatatgttgcgtaccggtcaggtgcagggcttcgtcgcgggcgatcagcttgatgattttggcgttgccttccatcagctcacgctcggcgaaagcaaacgaacaggcaaagctaacgtagaaacgaatggcctccagcgcgttgacgctcatcaggcacagatacagctgccttttgatggcgcgcaggttaacggtcaccgttttaccattgacctggtgcgtaccttcaccgagcagatgatagtaactggtcatttcgatcagatcgtcgtagtagccggagatatcttttgcccgcttgaggatctcctcgttggtgacgatatcgtcaaacaccaccgacggatcgttaacgatgttacgaatgatatgggtgtaggaacgcgagtgaatggtctctgagaatgaccaggtttcgatccaggtttccagctccggaatggagatcagcggcagaaacgccacgttagggctacggccctggatggaatccagcagcgtctgatacttcaggttgctgatgaagatgtgcttctcgtgttccggcagcgcttgatagtcgatacgatcgcgcgcgacgtcaacctcttctggacgccagaagaaggagagctgcttttcgatcagcttttcgaagatttcatgtttttgctggtcgaaacgcgccacgttgactgactggccgaagaacatcggctcaagcaactggttgtttttgttttgagaaaaagtagtgtaagccatgagcttggatccattagtgccgagctgaaaagtaaaggggccggaagagttccggcccgctgtatcaaacgttagatcttgcaggcgccgccttcacagtcgtcatcgccgccctgagcaggctgcatgtcttcctggatatcatctgcaccgtcgcgggtgttctgataatacagcgttttgacaccgaacttgtaggtggtgagcaggtctttcaacaactgcttcatcggcaccttgccacccgggaaacgggttgggtcatagttggtgtttgccgagatcgactgatcgataaatttctgcatcaggccaaccagttgcaggtaaccgtcgttattcggtaattcccacagcagttcgtagtcgtttttcagacgctcatactcaggaacgacctggcgcagaataccgtctttggacgctttgatactgatatggccgcgcggtggctcaatgccgttggtggcattggagatctgcgacgaagtttccgacggcatcaaggcagacagcgttgagttgcgcaggccggtctctttgatctctttacgcaggctttcccagtcgtaatgcagcggttcgttacagatcgcgtctaaatctttcttgtaagtatcgattggcaagatgccttgcgcataggtggtttcattgaaccacgggcaagccccttgctcctgagccagacggttcgaggccttcagcaggtagtactggatcgcttcgaaggttctgtgggtcaggttgttggcgctgccgtcggaatagcgtacgccgttcttcgccaggtaataggcgaagttgatcacgccgatacccagggtacggcggcccatcgcgccacggtgagcggctttgatcgggtaatcctgataatccagcagggcgtcgagcgcacgtacggccagcgtggccagctcttccagatcgtccaggctttcaatcgcacccaggttgaatgcggacagcgtacacagcgcgatttcgccgttttcgtcgttaacgtcatccagcggtttggtcggcagagcgatttccaggcacaggtttgactggcgtaccggggcgatctgcggatcgaacgggctatgggtgttgcagtgatcgacgttctggatgtagatacggccagtagaagcacgttcctgcatcatcagtgagaacagctctaccgctctcactcgttgctgacgaatgctgctgtctttctcatacagggtatacaggcgctcgaactcgtcctgatcggcgaagaatgcgtcgtacagccctggaacgtcagacgggctgaacagggtgatgtcttcattcttgatcaggcgctgatacatcaggcggttgagctgcacgccgtagtccatgtgacggacgcggttgccttcaacccctcggttgtttttcagtaccagcaggctttccacttccagatgccacattgggtagaacagcgtcgctgcaccaccacgtacgccgccctgagagcaggatttcaccgcggtctggaagtgtttgtagaacgggatacagccggtgtggaaggcttcaccgccacgaattgggctacccagggcacggatacggccagcattgataccgataccggcgcgctgtgaaacgtatttcacaatggcgctggaggtggcgttgatggaatccaggctgtcaccacactcgatcagcacgcaagagctgaattggcgggttggggtgcgcacgccagacatgatcggcgtaggcagtgaaatcttgaaggtggagatcgcgtcatagaaacgttttacgtagtccagacgggtggcgcgcgggtagttggagaacaggcacgcggctaccaggatatacaggaactgggcgctctcgtaaatctcgccgctgacgcggttctgcaccagatatttaccttccaactgcttcacggcagcgtaggagaagttcatatcacgccagtgatcgataaaggagtccatctgctcgaactcttcagtggtgtagtcttccagcagatgtttatcgtatttgcccatctccaccatgcgtgcgacgtggtcgagcagcttcggtggctcaaactggccgtaagcttttttccgcagatggaagatggcgaggcgagcggccagatactgatagtccggtgcatcacgggagatcagatcggctgcggccttgatgatggtttcatgaatatcggcggttttgatgccgtcataaaactgaatatgtgaacgtaactctacttgagagaccgagacgttgtttaaaccttccgcggcccagtcgatgactcggtggattttgtcgaggttgatgcgctctttactgccatcgcgtttagttacaagtaggctttggttcatttttacctgtccgtgagattcccctaagcagaaagtgtagtcgctctgctcagtatgtaaacactatatatagggggtgtatgtcggtgaggtaacaagatagtgataaagcggtgggtttgcaagtgaacaaaacctgccgatcttgtggataacttgggggtgaaatgttaccaattgttcctaatgcgcgccctatctggggtgacaaggttgtcaataagcgcgaggagattttgctgattttgtgaaaacctcgatcgtttgccgctttattaaacgttagaaaaaaaccgcatattgatctgcttttatattcttaaaaacggtttagatcggcttttttgatcgaaaacggataaataggtatttatcttatacgcttagtcgtaccggcggcggaaacatcgccgccggtacgttgtggccgtttcaaccttggtgctgggtatggaccatgtagttcacatccacgttacggcccagcttgaaatggtcggtgatcgggttgtaatgcaggccgatgatatgtttttcacgcagctcggtgccgtcgacccaaccgatcagttcagaagggcggatgaacttcttatgatcatgggtgccctgtggcaccattttgagcacgtattcagcgccgatgaccgccatcagccaggctttggtattgcggttgatggtggagaagaacacatggccgcctggcttgaccagatgtgcacaggcgcgcacgacggaggccggatccgggacgtgctcgagcatctccatacaggtgacgatgtcatactgttgcggatgagcctgcgcatggctttctaccgtttcttgcacgtaggtcacctgcataccgctttccagcgcatgcagtcgcgccacctggagcggttctgcccccatatccagcccggttaccaacgcaccttcacgcgccatgctctctgccagaatgccgccgccacagccaacgtcgagcacttgtttgtcaaaaatgcctcctgcgcgctgcatgatataattcagacgcagcggattgatccgatgcaacggcttgaactcaccttccagatcccaccagcgcgaggcgacagcttcaaatttggcgatttcctggtgatcaacgtttggcgcgtgacgggatgattcagcattcatgggcgttattagctcctggttctcttatggtgcagattatacatgttccggcacgcttggcgcagcgctgttgttaccggggcatttttcgcccgcagggcagcacatttcagcgaaacagcgccggtaatttccccgtaaagcgcgctttgtgatatagttttacacctttggcactacgccaaggcagatgaatcattcagtatgagggatagcagctccatgagcgaccttgccagagaaatcacaccggtaaatatcgaagaagagctgaaaagctcgtatctggattacgcgatgtccgttattgtcggccgtgcgttgccagatgttcgtgatggactgaagccggtgcaccgccgcgttctgtacgcgatgaatgtactgggtaacgactggaataaaccatacaagaaatcggcccgtgtcgttggggacgtgatcggtaagtatcacccgcatggtgacagcgcggtgtatgacacgatcgtccgtatggcccaaccgttttcgttgcgttacatgttggtggacggccagggtaacttcggttctgtggacggcgactccgccgcagcaatgcgttataccgaagtgcgcatgtcgaaaatcgcccacgaactgctggcggatctggaaaaagagaccgtcgacttcgtgccaaactatgacggtaccgagcagatcccggccgttatgccaaccaagatcccgaacctgctggtcaacggctcgtccggtatcgccgtaggtatggcgaccaacattccgccgcataacctgtctgaagttatcaatggctgtctggcctatatcgaggatgaagacatcagcattgaagggctgatggaacacatcccaggcccggacttcccgacggcggcaatcatcaatggccgtcgtggtattgaagaagcctaccgtactggccgtggcaaagtgtatctccgcgcccgtgccgaggtagaggcggacgctaaaaccggccgcgaaaccatcatcgtgcatgaaattccttatcaggtgaacaaagcgcgcctgattgagaaaattgccgagctggtgaaagagaaacgcgttgaaggcatcagcgcgctgcgtgacgagtctgataaagacggtatgcgcatcgtgattgaagtcaaacgtgacgccgtgggtgaagtggtgctgaataacctgtattcgctgactcagctacaggtcaccttcggtatcaacatggtggcactgcatcagggccagccaaagttgctgaacctgaaagatattctgcgtgcatttgtgcgccaccgccgtgaagtggtgacccgccgtaccattttcgaactgcgtaaagcccgcgatcgcgcccatatcctggaagcgttagccattgcgttggccaacatcgacccgattatcgaattgatccgccgcgcgccgactccggcagaagcgaagattgcgttaatcgcgcaaccttgggatctgggtaacgtcggggcgatgttggaacgcgccggtgacaacgcggcacgcccagagtggctggagccagagttcggtatccgtgacggtaaatattacctgaccgagcaacaggctcaggcgatcctggatctgcgcttgcagaaactgaccggcctggagcacgagaagctgctggacgagtataaagagctgctgaacatcatcgccgagctgatctttattctggaaaacccagaccgcttgatggaagtgatccgtgaagaactggtggccatgcgcgatcagttcggtgacgcacgccgtaccgaaattaccgccaacacgtctgatatcaacatcgaagacctgatcaaccaggaagatgtggtcgtgacattgtcgcatcagggctacgtgaagtatcagcctctgaccgactatgaagcacagcgtcgcggtggtaaaggcaagtcagccgcccgtattaaagaagaagactttatcgatcgtctgctggtggccaacacccacgacacgatcctgtgcttctccagccgtggtcgcctgtactggatgaaggtgtatcaactgccggaagccagccgtggtgctcgtggccggccgatcgtcaacctgttgccgctggaagccaacgaacgtatcaccgccattctgccggtgcgtgaatacgaagaagggcgccatgtgtttatggctaccgccagcggtaccgtgaagaaaaccgcattgaccgagttcagccgcccacgcagtgctggcatcatcgccgttaacctcaacgagggtgacgagttgattggtgttgacctgaccgacggcagcaacgaagtgatgctgttctccgccaacggtaaagtggtgcgcttcccagaagggcaggtgcgttcgatgggccgtaccgctaccggcgtacgcggtatcaacctcggtgaaggcgatcgtgtagtttcgctgattgttccacgcggtgaaggcgatatcctgaccgtgacgcagaacggctacggcaagcgtaccgcggtaacggaatatccgaccaaatcgcgcgcgacccaaggggttatctccatcaaggtcagcgagcgtaatggccaggttgttggggctgtgcaggtagaaactaccgatcaaatcatgatgatcaccgatgcaggtacgctggtgcgtacccgtgtcgcggaagtcagcgtggttggccgtaacactcagggtgtcactctgatccgtactgcggaagacgagaacgtcgtcggcctgcagcgcgttgctgaaccggttgaagatgaagagcttgatagccttgaaccaggtagcgatgaagcggaagaagataccacaccactcgatgagggtgatgaggataccggcaccgcagacgatttggatgacgagaacgcctaaatagtgcgatctcgtacaatctgggtggatcaaaaagggcttggcagcgatgctaggccctttttcagttgtatggtttaattgctgcaatcacttgtcgatgctgcacgggatcgttgttttgctatgattatgctcgtcaccccttactctggcatggtacctgcttgaaatacttagcctctttccgtaccacgttaaaaatttcccgctatctgtttcgggtgctggcgttcatgctgtggtcgctgggcgcactgctgaccacgttttatatcctggatatcgtgcatgagaaagaatccgatatcaggcaggaatacaatctcaactttgaccaggcacagggctacattcgccattcggcggatatcatacgcgacatcaaatacatggcggaaaaccgcctcaacggcacggtagggagcctcgagctgttcaccggcatgatgaatggcaaagacagccaaccggagatgaagccgctgtacccggaatccaactgcgcgctgaactccaactaccgtgatgcgatcacctcgttaaacggtctgatccaatactggaaagaaaactttgtcgcagcctatgacctgaaccgagtgtttttcatcggcagtgatagcctgtgcatgacggaattcggtagcagcagcggcatcaccgaccggcaaaaggtgctcaaggcgctgcatgagcgcatccttaaataccgtaacgccgccaacagcgcggagaaagacaataacctttattggatcagccccagccagcagcggcctgatgtaggttacctgtatgtgatgacgccggtctatgtcggtaacaaactggaagcgttgctggggattgaacagacgatccgcctggaggactttgtcaccaccagcaacttgccggtgggggtaaatctgctggatgagaacaacgaatctgtgttgcaactggccaatggcgatcgctacgcctcttcgctcaatgtttatccgcaggaacacacctattttggctatgtcgacagttaccaggatctaatcatgaagaaggcgctgccgccttcgtcgctcagcatcgtgtattccttgccggtgaagagcgtggtggagcgcttcaaggtgctgatcctcaacgcggtgctgcttaacctgctgtcggccgtggtgttgtttagcctggcgtggctgttcgaacgcaagatgttcctgcctgcggaggagaatgccttccggttggaggagcatgaacagttcaaccgcaagatcgtggcgtcggcgccggtgggcatttgcattctgcgcatcagtgatggtaccaacatcctgagtaatgaactggcacataactatatcaacctgttgaccaacgaggatcgcgatcgcattacgcgtattatctgcgaacagcaggtcaactttgttgatgtgatgaccagtaacaacaacaacctgcaaatcagctttgttcattcccgttaccgcaatgaggacgtggcgatctgcgtgctggttgacgttagcgcccgcgtcaaaatggaagagtcgctgcaggaaatggccgcggcagcggagcaggccagccagtccaaatcgatgttcctggccaccgtcagccatgaactgcgcacgccgctgtatgggatcatcggcaacctggatctgctgcagaccaaggcgttgccacaaggggtcgatcgcctggtcaatgcgatgagcaactcctcggggctgttgctgaagatcatcagcgacatcctggacttctccaagattgagtcggagcagttgaagatagagccccgtgagttttcttgcctggaagtcattacccacatcgcgggcaactacttgccgctggtggtgaaaaagcggctcggtttgtactgttttattgaacaaggagtgcctgagcgtatcaatggcgatcccgtgcgtttgcagcaggtattgtctaacttattgaataacgccatcaagtttaccgataccggctgtatcatcctgcaagtctgcacccgtgacagctatctggagttcagcgttcgcgataccggcgtcggtattccagataaagaagtcctgcgcctgtttgatcctttcttccaggttggcagcggggtgcagcgccatttccagggtactgggcttgggctggcgatttgtgaaaaactgatcaacctgatggacggtgatatcgcggtggagtccgagcctggcctcggcagcttgtttaccattcgtattccgctgtttggggcgttgttcccgacgccgcaggccagcgatacctggcagggcaaaaacctgtggctgcaaattcgtaatcagcggttggaaagctatctgcaggcgatccttggcggctacggtgccacggtattacgttatgaggggcagcaaaccgcgacaggggatgttctgctcagcgattatcctttgcaggtggataccccgctgttggcacagatagagttctccatcgcgcacatcgggccgtcattggaaacgcatccgggttactggctgcatagtacctctacgccacgggatgccatcctgctgttgaaccggctgtttggtgtggttaccgaaagcgacaaggcattggtgcaactgccgttaccggttaaggccaatagtgccgataatggggatattcgcctgctggtggtggacgatcacccgattaaccggcgcttactgtccgatcaactggcatcgttgggctatctggtgatcactgccaatgatggtgtcgacgcgctcagcgtattggaacgcaatacggtggatatagttctgaccgacgtcaatatgccgaacatggatggctatgaattgacacgttgcctgcgtcagtcgaacttcacggctccagtgattggcgtgacggctaatgcgttggcagaagagaaacagcgctgtcttgaggccgggatggataactgcctgtcgaaaccggtcacgctagagacgctggagcagtcgcttggctattacagtcaacgggtacggcggcttagggctgagtcggaaactgcataaataccaaagggcgcctaagagcgccctttagattgataacaatgttgtttcaggggtgccgcatgctgcacccgttgaacactagtctttatccaactgcgtcatactgacggaggagagatagttgagcagtgcgatatcgttatcaacacccagtttcatcatggctgatttcttctggctactgatagtcttgatgctgcggttcagttttttggcgatttcggtcaccaggaaaccttcggcgaacagacgcaacacttcactttctttcggagacagacgtttgtcaccgtaaccgctggcactgattttctccaacagcttcgagacgctctccggcgtgaatttcttgcctttctgcaatgcggccagcgcttttggcaaatcggtgggcgcaccctgtttcaggacgatgccttcgatgtccagatccaacaccgcgctgagaatggccggattgttgttcatggtcagaacgatgatcgacaattgcggatagtggcgtttgatatattttatcagcgtaatgccgtcgccatatttgtcacccggcatcgaaagatcggtgatcagtacgttggcgtccagcttggacagattgttgatcagtgctgtagagtcctcgaactccccaacgacattcacccactcaatttgctcaagtgacttccggatgccaaacagtacgatagggtggtcatcggcaataattacgttcaagttattcatgttgttggctaccttgctgcagcagtctactgacgaaaaaatcaatctgactgatgttattctcgatcttgagcgcatcaccgtccgcgatgtgctgttctaacgattcacacagaagctttccgggaagcagatttaacatagcaaacacgcccttcaggcggtgtgcagtttgagacagcgctgcaaaatcactgctgcctgcctcagtatacagttttttgatatcgtcgggtactgtatcaataaacaaaccatagtaatcacttgatctcaattgtttttcatacacttgggcgctatcggccagcgatcctaccgggttttcttcctgctcttgtgccgccatctggtgttctatcaggatcagaaccgcgtcaatcatggcattgtgcaggttatagttgacgcgaatatagcctttatcaagctgctgccagcccgcttcatcgctggttagcagtaacgtatagtcgtcggcctgctgcgggttatcggtcagtaatacatcataatcctggctgttttggtgctcctcggccacgatgcagttggccccatagcccgccagtagctgagtcacgatacgacggatctcgtcggaggtgatatccagcagcgccgttaccccatcgagtaatttctctgtcgcctgttcctcggtgttctcctgctccatagtgacacgaatggtatagcgggtaccgatatcgattttgctgcggatatccaactggccattgagttttttgcacagctgattacacaggaaaaacgtcagcccagagccgtgatcgaagcgatcgaccagcgtttggcttaggaacgggtaggtcaggttgctgatttcctcattggaaatgccggtgccggtatcattgatatgaaataccaggtgttcagggcgttcggcttcctgttctaccaccagggtgatcttgccgtaggcggtggtgatgatggcgtagcgcagcagtaatgaaaggattttgcgcagtgcgccagcatcgccaatgtactgttggttgacgtccagattaacgtgattgaatagcgccagccctttctggttgatggctggcagcacgtccagcagcagttcatccagcagtgcagagggattgaatggttgacgtaccggctgccaatcctgtgtttccagccgggtgagcagggtgatattgtcgatcagatccaataccgatgcagaagccaggttgagttgtttaagcaatgtctgttgctgctcgatatctgatggctggcacaggctccgggtcagttcgtgcatttgtcgcaccggctgattcagctcgatccccaggttgtgcaacatcaacttacgggcctgaacgtttttatcgtattcgcggcgggcctgttgcagccgtttgttcaccatcacttctttatcctgatcgttgagcaggaacagataggtttccgccgttcgctgactgcggaagatgcggatctcatagacttcgttgttgaccgttgcctggatcacgccatgatgctgctccgccatatgggcgattttggacaggctaagatgtggcatcaggtgctcggcgatcttgttgctggtaatcacgctgttgtcggcaaagtcatagaccagtagcccgcaaggcaggctggcgacaatttcctggttgagcgagcgttggagatccagctcggcggcgatattttcgctggggcggatgtattgctggcggaggaaataaatacccaccatcgatagcgccagcaacagcagattgatcgccagtagccagatgttattgcgcaacaggtcaatcgccagattgaaagctgagacgcggtaaatcagctgcagaggcgagttgggcaatgaaacactgaattcaacccaactgcctttcaaggcggcctgggcgttgattgccgtttcgcttggcaccacactatcgtcgatctcttgctcatcgggcagcaacaggaagttggagcgggccatgttaagcggaatgatatcgttaatcggcaggtcgaaggcgaccaccgtggccaaatgccccggctggttaaaggtcgtgcggatagaaaacgagtaggcgttctggaagcgttgtttgcgcaggccggaaaaactctcgcgttcgtccagcatattggcctgttgtagcatttcggtgcggcggtccgataccgacgtggtcaggtagttttctttcaaccgcgaggtcaggtctttcagcgattgggttgtcaccaggctcaggctgttatcttgcccgttgagaaaatacatcgcatagttttcggtttcggttccccaacggttatccaggaagtccgaaatactggcaaccgcagccagcgtggcgttgtcgtggttgccaaaaatgaccgcatcggttttgctgcgtggcttctcaacgtaataaacatccgggcgcaggcgggtttcctgcagatgggtttcaacgggaagcgccgcggtattaccaaatttgtcgtagatttggtaggtcagaaagcggtaactgtcgatgcgcttttgcagcatattggcgatggtactgacggcatgctttttctccgtcaggtaggcgttggtgtagttgtaactgtacaacccaatggccatggccagcagcacgataaacagccagaagctgcgtgtgatgtagcgggagttaatggtcagttgtctatcttgcaacatggctacgcattcctgaaattagcgagtgaccgctttggcgctggcagtgacgatcagcagtaatgccgccacacaggccagggcaaacgtcaggctggagatctgggcgattaacccgatcaccgccgggccggctagaataccggcatagcccaccgtggtgaccgaagcgatggccaggttggcaggcatgacgcgttggtttccagctgcgctaaatagaatagggaccacattggatgccccgacgccgaccagcataaaaccaatcaaagaggctatggcgttgtctatggtaatagccaatgccaggccgatggccgcacacaggctacccagcaacagtacctgatatctgcccatggcatttaccacgcggtcgccattcagcctgccgatcgtcatggcaatggagaacaaggcgtaacccaagcctgcctggctatgatccatcccgcgcatggtggttaggtacaacgcgctccagtcgagcattgagccttccgccaggaacatgataaaacacagtaggccaatgaacatcacccagccacgtggcagaacgaacatcgggccttctttatctccgccgctctcacgcagcaggtttttactggcaatcagcagcagagccagaatggcgacgacggcgatcagagtggcttgcagcgggcctagccccagccatagcagggcgctgactccacccgcaccggcgatcccaccaacgctgaagaaaccgtgaaagccggacatcatggcacgatggctggcgcgttcgaccaccacggcctggatgttcatggctacgtcaatcatacctatcgccgcaccgaacagcagcaacgccaatgccatccccaaggtggagtccatcagcaccagcagcggcagatcgatgcatagggcgatgcccgccagcaggatcacgcgtcgacagccaaatttgccggtcaatagcccagtcaacggcattgccatgagcgagccaaccccgatgcatagcagcaacaggcctaatgagccgtcatctatcgcgatacgcgttttggcaaaaggtaccagcggcgcccaggtggccattgccagtccggcgataaaaaaggccaggcgggtagcattctgctcgggcacaccgggcttactttgttcgttgcaagtgactgtcatgtcggtatcgggatcggctctggatagtggcttaaatgaacccctgtttttatcacaatctgtgatcggggtcgaaaggattcgcgttaaccctgtaacccatcagggggggaggtgctgtgttagatcacttgctgatgagggtgagatagtttctcaaagtaacaaatatattatcgagggaattgatgcaggattcattgttattttgtatgtgattgtgggctatttaaacgatgagcgcctgaaaattattcactggttaattagtggtcggtatttttattatttatttagctattagtgcggtgattgatcatgtttatgatatctcattgtgattaaatttgtgcataaaatgctttattggaacgatttgcgcgctggttttgggtataaaaaaaccggccagaggccggtcgtaactacaaaaattatcatacggataatgaaggtaataatgaaaataatgatgatagcggggtgattatagcgccaggcgttgaagcgatttttggcacaacgtgcttattgtttgatacttttgtactgatatctttatttttataaagatttgtatatttcattgttttataaggtttaatttatttttttatctttcggtgcttaattttatttgtcggtaagtttttgttaaagttcgccagtatttacattttgaaacctttaaatattggtatgaaacactatcggatacttggtatcattttctttctggattaatatagcccttgttaccagaatggtgattcacagtcgcgctaataatgctcagaagagcagtggccgtagctcgacataattaagaggataataacgatgaaacttcgagtactctccctgatcgtcccagctctgttgatggcaggcactgcaggtgcagcagaaatctacaacaaagacggcaataaactggatttgttcggtaaaatcgatggtcttcactatttttccgacaacgataaaaccgatggcgatcagtcttatatgcgttttggcctgcgtggcgaaactcagatcaacgatcagctgaccggctatggtgagtgggaatatcaggttcagctgaataaaaccgaagctgaaaatgatgccttcacccgtgtgggcttcgctggtctgaaattcggcgattacggctcattggattacggccgtaactacggtgtgatgtatgacatcggcgcatggaccgacgtgttgcctgagttcggtggcgatacctatggtgcagacaacttcctgttccaacgcaccaacggtgtagtgacgtatcgtaacaacaacttcttcggtctggttgatggcctgcactttgctctgcagtatcagggtaaaaacggcaacggtgaagaaagcaacaatggtcgtgatgtcctgaaccagaacggtgacggttacggtatgtccgtttcctacgatctgggctatggcatcagtgctgctggtgcgttcttcaatgctgaccgtaccaacgatcagaacggtggccctaacggcacctcttctattctgggtcgtggtagtaaggccgaaggctatagcggtggtctgaaatacgacgccaacaacgtctatctggcagcgatgtatactcagtcttacaatgctacccgtttcggcaacagcaatagctctctgtacggttacgcgaacaaggcacagaacttcgaagtggttgcacagtaccagttcgacttcggcctgcgtccttccgtggcgtacctgcagtctaaaggcaaggacattggtggcggttacggcgaccaggatctgctgaaatatgttgatgtgggcgcgacctactacttcaacaaaaacatgtccacctacgttgactacaaaatcaacttgctggacgacaacacatttaccgacaaagccggtatcaataccgacgacgtggttgctgtaggcctggtttaccagttctaagcaataccgtgaatgtgacaacgcggccttcgggccgcgttttttttgcccgttctccagcagcacagattgatcttcgcgcggcactgattgctattctgctgagcccgtacctgtctaccctgtttataaattgataaatcaggaggttgttatggaacttaagattgaacgcgtgattgagacggtgctgtatgtcaatgatatcgaacgagccgctgccttctaccagcaggtattgcaactgccagctatggtcgcaaatgatcgtttccgggcctataacatctccgatcaaagcgtgttgctgctgtttgtcgccggggattcgctggacggtgctcactatccgggaggctatattccccctcatgacggcagtggcccacaacatcttggtttggccgtgagcgaggcccagttacccctgtgggagcagcagttagccgaacacggtgttgagatagaggggcgtatgcgttgggaacagggggcagagagcatttatttccgcgatccggatggccacctgttggaactggtaacgccgggtatctgggccaactattaacggcagcaaagcattattggcagaaaagccttttagcatctacacttagataacaataagcatgctaaggagataagcgatgacaaagaaactggttttgaccgtatgtactgcggcgctatttaccgtacttactgggtgtaccacttacgacagggccacgagctatgtgaacgagcctgtggtaagcgatgtcaaagtcgggatgacgaagcagcaggtgcgagccattgccgggccgccatccacctcagccaccctgatccatgcgaagggtacctgtgatacctatgccgtggcaccacgggatggcaaagtgcagacctattttgtcagctacaacgacacgggccacgtgatgaacaagggctatcagagttgttcagagtacgatacccaacctaaataacggcctatttagtgttcaaaagagcctcgctgatgcggggttctggctttttttaccacaatcggcctgaaatttaagcgaacgcgcattttgacgcttttttttatgtgaaaacgatagacatttcataacggtaccgttaatatctgcgcccattggaaggatggccgagtggtttaaggcaacggtcttgaaaaccgtcgagtgtaacagctcccagagttcgaatctctgtccttccgccaaatacagaccccaagctcgtaagagcttggggtttttcgtttgtggcaatgttgagtaagccattggatgttgactgtagttacccttgtttgccttgtgttgagcaggtatttgagggggccgttacgggctttatgccaatacgctaatacaccatatgccagctggtttacgcctgtcgcagatctgtccttccgcactaattatcctgaataaaaatccgctcatcaccgcccctggtttttctgctaatcgtgattttttagttaatacaaatcaatgaattaaataattcaccatgaactgagtcacaaattccatctaaaggctttgtctgttctttctctgggtcatacattgctaactcgagttagcaatgagggcgggagcaatgcggcagctgttttatcgtaattgatgtcggtgcagagcgagcgtcagagcgcggatatttaacgctgaggggggagcgtctggtctttgctgttcgcccaatcagccagtttcatcctcacacaaaggtggtggaacagtcgtaagaggaaatccggcaggcaaaatatcaactgtatttgcagatgtatcagcatcaacagctggctgcggatgtcatgcaggtatgggcttaactaatcaatattaaggaatcgaagatgctgacagtaaaacttccatcggcacccgcgccgattgagcctcaacaccaagagatcctgatggtgacaaacgccgatctgcgcgagtccgccaatctggcatgttggccggtacaacagcagtttgaaataaaattgcaggcggcgttggagcggcatggttaccgtatgcggcgtgcccacccggtagatgctcagcgtggccacgggtttattagcaaccagcgccagggtagtgacctgtttgcgcagatcgatgctgatgcgccagtgatcgtgctgttaaccgcctggcagtattcacaccatatcgccccttcactgatccaccaccgtggtccggtgttattgctggcaaattttgacggtacctggcctggcctggttggcatgctatgtatggcaggtagcttgaccagcttgggcaagcaatattctcgtttgtggtcggtgaattttgacgacgatttatttgaacaggggttggcaacctggctacgtaacggggccgtcagtcatcctaccggctacttgcggcccattgagccaacgcacccggtgatggccagcgtagcaggccagcaggggcggcaggtaggggaatatctgctgcgcaacaaggcgatcatcgggctgttcgatactttctgtatgggaatgataaatggcgtattcccgcagcaagcgatggtgaatatcggtatgcctatcgagtcactttcacaatcggcattgctgatcgagatgaacaaggtgccacaggcgctgcgcgaggcctgtttgcagtggtatgaagaccgtgggatggactttaagttgggtagcgacagccagcaggagctgactcgtgagcaggtgctggagcaatgcgccatgatgattgccatggcgcgctttgttaagcgttttggcctggctgcggtgggagtgcaatatcagcagggcttgaaagacagctgtgcggcgtcagatttcgctgaaggggctatcggtaatgcggagcgtttcccgatcccagacgaaaatggcgaaatcatctggcccggcaaagccattccttgcatcaacgaagtcgatatgggtacggcgatccctcaggcaatgctgtggcagttgctggatgcgttgggcatgccagctgaaactacgctgcacgatattcgctgggggagtgagtatcagggcacgttctattgggatctggagatttccggggcggtgccgtttgcacatctaaaaggagggatcgccggtgctaccggctatcgccagccagcgatgttcttcccatatggtggctcaactattaccggccagggcaaaggcggccgctttatctgggcgcgtgcacattatgagggcattgaggtgattatgcacatcggtaccggccacgcggtggaactgcccgaagccgagtttgaacgccgtcggcgggcaaccaactacgagtggccattattgaatgcggtgttggacggcgttgggcgagatgacctgatggcgggtcaccaaagtaatcacctgacggtggcctatgtagaggaagcggtattggcggaggtcttcaaggcttttgtggcccagtctctgactcaggggatccgcgtgcaggtagcaggcgatgctctcaaattgctgtaaggaaacgatgatgcaaacgcgaactgaagcacagaagtacaccggtatctggcccgtgatgctgacgccgtttagcgaacggcgggaaattgattggggctcactggaaaaactggtggactggtatctggatgcgggcgtccacgggctgtttgctgcctgccagtcgagcgaaatgtttttcctcagcgacggcgaagcccgccagttagtcaggtttattgtcgagaaggttgacggccgtgtgcccgtggtggcttctggccataccgccagtggcatcagccagcaacaggaacagctcaacgccatgtgtgagacggggattgatggccagatcctgataagcaaccgcctggccctggccggggagccggacagtcaggtattggcctcattgcagcaacttaccgcagcgctccccaaggagatagatctgggtatttacgagtgcccatacccctttaaacggttgctatccgatgaggtggtggcctggtgtgccagcagcgggcgttacacttttatcaaagacacctgctgttcgttgcccgtgattgagcgaaggctgagcttaagccagggtagccgtctgcatctggccaatgccaatagtcagaccttactggcctcactgcaggccgggtgtcaggcctatagcggggtgatggccaacttccatcctgcgctatatgtctggctgtttgaacactggcgcgccgagccagaaaaagcggctcaattagccgactacctttctaccgctgcgttggtcgagaatctcgattatccggtgtgcgccaagttttatcagcaacagataggtaatttcagctccatcgcttgccgctctaaaaatagccaatcgtatccggaaagtttttatcccgaagcgattaacagcatgctgcggctcggcgaaatgttgcaaattcatttacagctttgatgacggggaaagctatgtctttgacactcagggttcagcaatttttattgcctcaagactggtcgggttttaacaactgtcatgcctcaacgctacttaccttaactagtggtgacgtgctggtggcttattttgccgggcagaaagaaggtagtagcgatacggctatctggctatcgcggcaacaccagggagtatggcagacaccgcagagaaccattttcagcgagggattggcacactggaatcctgtactgcacaaacaacagggagatatctggctgttttataaagtcggccccaatgtccatgaatggaagacccgctatgtgaaatcatcggatgacggcgttacctggagcgcacccgcggaattggtcaagagggatgctttgccacgcgggccggtgaaaaacaaattgttggtgaccagcgacgggtgttggttggcaccagggtcaaccgaagacgatcgccattgggatgcctttgtcgatcgtagtgaagatgggggccagcactggcagatggttcaggtgcccattaagcatcaacagcaggccagccatgatgacagtcagctatggcaagggttacaggccgatgccctatgggaaaacgatcttgaaagggtttttcagtgggatggggtgattcaaccttcgctgtgggaatcggccgcaggccatattcatatgttgatgcgtagcactcgcgggcgcgtttatcgcagtgattctacggataacggtaaaagttggtgcgcggcctacgctacctgcctgcccaataataacagcggtatcgatctggtacgcgcggctcagggcgtcctggtacttgcctacaacccgatcgaaggcaattggggtcggcgtttcccgatttcactcagtctgtcgtttgataacggtgagcactggtcaaccccgctggatgtagagagcggggaaggggagttttcttaccccgcaatcatttttgagggggatactttgcacctcacttacacctggaaccgaaaaaatatcgtctactgcgcattgcatctggcttgaagcagcccggacgaaccataacagtaccctacaacattcgccggctgtaagcagtgcggtgacgccagagtgcctaaaacgttctggcgcgactcaatgaggtagtatgccatgtcagtttctctggatatgcctgtaacacaaaaagccgtactggataaatccagtattcgccgcgtagtggtgtctagctggattggtaacaccatcgaatactatgatttcctgctgtatggcctggcgagtgcgttagttttcagtaaggttttcttccccaacgtcagccctctgaccgcgatgctggcctctttcgccaccttcggggtgggctttgttgcccgcccgctgggcggagtattcttcggtcacatgggggatacgctcgggcgtaaaattaccctgttaatcacgctgggcggtatgggggctgcgaccttcctgattggttgcctgccctcatataacagtatcgggatctgggcaccgattttgctggtggtgctgcgcttcgtacagggttttctggtcggtggtgaatggggcggtgcgatgttgatggtggtcgagagtgctcccgccaatcgccgtgggctgctcggttcaatcccacagaccggggggttctctggtcagttactggctaccgggatatttgcgctagtgacccagttaccggaacaacagctgttgtcctggggatggcgtattccatttatgctgagcgtcgttttggtgctggtgggcatgtacatgcgccgtcgcctggatgaaacgccggtgttccaggaagtgcaaagacagcagaaattgaatccgaaaaaggttgtgcaaaaagaagagagcccggtgatcacggtggtccgcgaccagtggcgcagtattctgctgattatggtgctgcgcttcgccgaaagcgtgccgttcttcatgaccacggtatttgcagtgtcctacgctaccactcagcttggggtcgataaacagaccatgctgaacgtgattatgtccacctgcgtgctggcgttcccgatgcatatgctgttcggcgctttgtccgataaggttggccgacgcccggtatacattttcggtgcactctttgccgcagcaatggccttccccttcttctggttactggaaagcggctctttcgtactgatggtgctgggctatatcctgctgattaacattgcccataactcgattaacgccgtacagccttctttcttcacggagctgtttggcccaaaagtccgttacagcggggcatcgattggcgcacagctgggggccattgttgccggaggcttcacgccgtttattgctaaaggattaacggcaatcgataacaatgactggacgctggttgcctgctatgtggtcattgcggcactggtagcggcctatgccgcctggcgggcgccagaaacctccagacgtgatctgacgaaagatacgctgtaatccgcaacctgccagggcgactacgccgctctggcaggtatctttcaaccaccaatttgtgccccgctggtgtttgctcataccgctagatcccgcgctgactcgaagtagctaagtctgatagactagagttcttgattgtttttcatggatgctgttgctcatggctaaaacagtagagcaaattgccactgcactgaatatctccatcacaaccgtccgtctggtgctgaataataaagcgcaacaataccgtatcagcagcaagacccaggctcgcatcaatgcatacgtggccgaacatggctacaccgttaaccatacggctcgcagcctcaaactgaataaaaccgaaacgcttgggttaatcattccacggttatctaacgtatttttctcaacgctggccgaaaaactggaaatccgctgccgtgaggcgggctatcaattgatgatctgctgtacctatagcgatttgaaacatgagaacaggctggtggaagccttggtagcacgcaacgtggacggcttgtttgtggtgccttcctcgctgcaatcgcagaaacaccatatgaaacgctcaaccaaacctttggtattgctggaccgagactttggcatacccgacgtatcgctggtggtgagtgataatcagcgcggcagcgccgcgctgaccgaagcgatgtttgacgcgggccagatgccactgtttttcatggccggtgacgtcggccaaccgacgatcaaagagcgtatgagtggctatgaggcggtgctggctacgcgaggtattgcagatacgcgccaatggataatggaggcggcgcataaccgccgggaagatggcgaaatgctgatgcgtacttttctggaacatcatcactcagcgccgcctgcgtttattgcttcctcgctgccggtgctggaaggggcattaagcgtgctgcgctcgcattttggctatattccttcggaaattaatattggaactttcgacgaacacccgatgctaggatttttatccaataacatctggtcggtacgccaaaatgaggatgcctgggtcgaaaaggcgtttggagccatgcagcaggcgttaaaaggagaagggcaaagtcagcgggcgattatccccatgacgctgctacaccgacagcgagccaaccaaagccgagaggtttaacttttaggcgtgccattatttaacggtgaacgccgcggcgttaggcaacattaacctcattaatgcccccagattgacgagagttctgttgtaggccgcccagttgttgtttttaaattttttgccacgggacaccgctacaggatcaggaatgtggtgttctgatcctgattgcagtcagaagttcgatttaatcaacaaagccaactggaagaggacgtttacctgtcgttcacatcgccatcaggatttcggtaaaatcgttagtaatggatgatgtcatgggctcgtcacgttgaataatataaaagcatgcgctgatattgatatcttcagcagatattttcttgaggttcagctgcgggctgtattgtgtcacgatacgatcgcttaatagcgcgcgataaccctgttgtttcactaggcaccaggtggcgaggaaagaatcagtttccacgacatgaccctgctgcgtgcacgggaaagaggagtcttgcattgctaaacggccagcagtacaggaatgtgggactacccacttggtgttgtccagcggcagctcatcaggggattgattgttcccttgataaagcgaaaacgtttcacacttaaagtcctgcgttaccagatcgacacagttaatcccctcgctgaggttacagaccaccagatccaattcgttatttctcaacttggcgaccaacccttcggggcaatcctcaatcacgacaatacgggtgtgtggataacgctgattaaagatctcaagggcgtcggggagatagcatagcaatggataggtgctcatgccaaggcgcaagaatttctctccggtttcttgcagtccacggaattcataaatggtatttcttaactcattggtgatagcgtcaatgcgttgaaaaaaagcttcacctaccgccgtgagccgaacaccacggttgctgcgttccaatagacgcgatccaatattttcttcaagttctttaataatacggctgagtgtcggttgtgaaatagccagtttttttgatgtttcatgtaaactaccgcaataaacaatttctttaaaggtagtcaggtgagataatttcggcatacttttcataataagtctcttcattcatattttaatcagctgtgtaaaaggggcctgcatgacgttttttaaccagagccacaaattcggctataataggcctgcttcatcatgctatcgccaagtaaagtattgacggttttatcaagtaccgtagtagtgacagaggcgggcatgagagttgcggtgatctccacgtcatcatcgccaaaaggctcgatatccaggtgcgagataaagcagttttcggcttgcatcacctgtttgaatttggctaacgcttcgcgctgctcgtgttcaaatgcaataacgcagatctggtaggtagattcaccgttaacatcgctgaagggttgtttgttgaccatattgacgatcgggcgcagcagtgtgttggcagccagcacgtataaggtagcggccagtgcatctccatataatgcacaacccgcacaggtaccaacggctgccgacccccaaagcgtagccgctgtgttcaggccacggatattcattccttctttcatgattgccccggccccaagaaaaccgacgccagaaaccacataagaaatcactcttaccgcacccccactgccatcaatggtcatagccagatgtacaaaaatagctgcgctggtggcaacaagcgtattggtgcgtaacccggcggtgcgttgccggaactgtctttcatagccaataattgcgccaagtaacgatgccgttgacaacgttaataatgtttgaaaaaaatgcatgataaaactcaacatggtatctgcttatcatgaaacaccgaataaaaggtaactcttgataaacaggtagttaaaatggcagatttttcatctgccagtcagcgattaaaattcgatattatgccttggcagacgcggatcagcggcgtttacacagggcttggctttaataggccgaagtggcaatttgctggcttagctccgcgctgatttcttcgatcaggctttgcattgagcgtttgttccgctcttcacgccgcagggtgatttcataattgccagtaacggtagcgggttctgaaccaagcaaaataatccgatctgacatcattacggcttctgttacgctgtgggttactaaaatcatggagcgagtttttatttgccgcgtcgaccaaatctgcattaggtcactgcgcagattttctccggtataaatatccagggaagagaaaggctcatccagtagcagcaattcaggttcgacgacgagcgcacgggcaaaccctacccgttggcgcataccaccggaaagttctcgtgggaaagcattgcgatacttttccagaccaatcaggttcagcatttttatcacctgtttatcgatggtgtcttgggaataatgctgtgcctgcaatccaaaggcgatgttttgatagacggttaaccaagggaaaatagcaaagttctggaaaaccatattgatttgtgggttagggcctgagactttgtcctcacccagcatgacatcaccaaaatcaggagatatcaaacctgagatgatccgcagtagggtagatttgcccgatccggactttcctaatacgctgatcacttcattgtcatagactttgaggtcgatatcactaaggaccaaatgtgatttttgggccgtaggttggaagctcttgctaacgttgctgacagtaagtaatacttttttcttggccatcatatttccttggttatatttaaaaattggcgaataggatatgccgctgagttttgctcaggaacatccagacgtgaaaatttacacgggagaatgccagcggccttattggtctgattaataagttgaattctggctattgagtggtgctgtcagctagggatcgcctagtataaggcgctgaaggaagtaagaataaagtgcagttgtgacgtgagtacgtcacatccggatactattcaggacgcagtaaaatgattattgcgcctaagcctccagcaggctcaacaaaccaatgaataacgaaccgtcggtgtccataattttatcctgtatcaaatcggagtctcatagtacccacaaggctctggaagctcaataactgagtggtgttttagaactgcaaaatgtaatttaatattaatgggtgtcgcaagggttgtttaaactaaacatagcgtcaacgaggttgtagtttaaatacgtggctggctataaatcccgaagaaatggaagtgaaactaaaccgttaaatgattgcaatgcagtcaatgtggtgattattctctttggcttcgctatgataaatactataatttcagagggaaatgccgattggcaatgcggaatgcagaaaaaacggctagcatgattgtattcactgtttttaactttcattcatctgcccgcttgctgccttttatccgttcaaaaacgataaaaaagcccaatgaggccaaacctcattgggcatgtgtttcagtgcttaacttctcagaactggtacataatccccgtctcgacgacatcatcagcacttaaaccggccgcattgtgtttatccagcaggttcagtttgtactcaacataggtcgacatattggcattgaagctataacccagcgccatatctatatacttgaccagatcggtatcaccgatgccaggcaggtcacgcccacgtgactgcaaataggcaagagaaggggtgatgccagaatcaaagtgatactgagccacggcttcgacggcatcggcctttggtgcaaagccggtgtagttgccaccatccacgtaggtcatgttctgagtgcgtgtatagtttgctgccagatagaggttatcccgatcgtacttcaggcccagagtccaggctctggcacgatcgccattggccagaccaaaactacgctgtgcctgtgtacgatccgaattggcgtaggcaccgccagcgctcagtccccaacccatgtcgtaggttgtggagaaggaatatccgtcgccgttttgtgtctgtaggtcttgcgtgcgatgagcgtcgtccccccgattctttccctgatattgcatgccgatattcaggccatcaataatcccccccaaaccctgattatgataggtcaacatcccgttgccccggctggtcataaagttgtcagcagcttcataactgtcattaccaaactcgggtaatacatcggtccagctgccaacatcatagagtaaaccgtagttgcgcccgtagctgatgctgccaaacgggccgaatttcaccccggcaaaacccaaccgcgtatagttaccactttgctcgccgttttccgcttcgttcagcccaatctgatattcccattggccgtatcctatgatgtcatcattaatttgtgtttcacctttaaagccaaagcgagtgtaggactgatccccgctgctgccagcattatcactgaaataatgaacgccattaatctgcccatataaatccaatttattgccgtctttatttacgatttctgcggccaacgtggtgctggctactggcaatagtagccccaatacagccaagtgcattttatttttcatttcaataacctgatgttaataaatacgttgaaagttatgacgctttttgtgatatcgcaattttcttatacaaacgatcgctggtttcatcaataatggatgccatattctgcctgccccgtgatcctcgtggtctgtcgataacgatctcatcggtgatctgtcggctattggcatccataatgacgactcgatcggacatcatgaccgcttcttctatgtcatggctcaccatgacgatggcgctggtattattttttttgctcgtccagatattcattaaatccatccgcagtttctgcgcggtgaagatatcaagagaagaaaagggttcatccaacagtaaaactttgggctccacggctaatgctcgggcaaaacctacgcgctggcgcataccaccggaaagttcacggggccaggctttctcatacccattcaagccaaccagcgtgagtaatgctttcagctttttgtcgatcaagggcgctggcaagtcttgcgcgagcaggccaaaggcgatgttgtcatacactgtgagccacggataaagagcataagactggaataccatgctgatatcggcatcgggtccttcgataggttttccagccagcgataccgtgccggtatcagggaaaataaggccggcaaatatgcgcatcaacgttgatttaccagaacctgactgcccaaggatcgtaacgaattcacccttgtgaatattcagattcacgtcgcgcagaacttccttagggagcttgttttctccaatgaaggctttgtttacctgcttggcgctgagcaccacttcttgaatagtcatttaattttcccacgttaatcatatttgaatttggtttctgctacgcgatacagcggctgccagataaagattacgcataacgccaccagcgagcacatggcagcacagcccagcgcggattccgggtttttaccagcatcggtcacgactgaaataaaagcgcctagcccggtagtactgatcgtggtagctccccactgaatgacctctgctgcaatggcgctattccaggcaccgcctgctgcagaaataatgccggtaacgatgtaggggaaaatcgcgggcagcatatagtaacgccaccatttgaaactccgtaaaccgaaggtttcgctgacttcggtgatatgtgatgggattgccgtgacgccagcaatgacgttaaacaacacgtaccactgcgtgccgagcatgatcattggaatcgcccaccagccaaggtcctgatgataaacagcgataaaagcggcgatcagaggatagaaaatattcggcgggatagcagccaggatttgaatgatcggttggaagaatttcaccaggcgtggattcatacctatccagacgccgagtggggtgaaaatcacgatactgagcaccattccagccactacacgcgcagtcgtcagcagcatccattcaggcatcatggcgaagtattgctttgggaaatactcccacagttgataaccgaaccaggcacaggccatgaccaccgcgagataccaagtactgcgccacagccagttggctttggcggtgatacgaaacagcttgtgcaagccaaggccataccagatctgcggcagtttaaccagccataaatcagccagcatacgcagggccgctgacaacattgatcctatatgggaatcgctcaggcagttataaaaccatgagctgccctcagttttattggcggtaacatcttcgtatttgaaacgggaggtatagcgaaccaacgggcggaaaaccaattggtcgagcacgataatattggctgccaatgtgatcacggcaaacagaatagcgtgcaggttttgctgcgccagcgcttcggcaatataggagcctacaccaggcaactccactgatttatcgctgaccgggatagcctccgacgccaccagagcgaaccatgcagccgattgtgacaccatggcattccacaataacccgggtacggaatagataaactctaaccgccagaagcgttgccatggattgtagttgaaactgcgtgcggcttcatccagttcacttggaacgatacgcagcgtctggtacagcgttaacatcatattccatgcctggccggtaaataccgcaaagatagcggtacactccagccccattacactgtgtgggtacaggtcaagaaaatataccgtggtgaaggttaaaaaacccaccaaaggtactgactccataaagttgacgaaaggtaatatcaccctgcgtaatggcacatagcgagctgctaagacggcaaagacaatggaaaataacaatgaccaaatcatgccgatcgcaaaccgcattgtcgttcttagtgagtaatagaaaagattccaggtgtccagactaatggtgcccacgctgtgttcatcgaacgagccgtgcatgtccccccaggcacggataagaaagacgatgaccaatgatgctattacaaaaacaatgaggtcatttagatagtactttctagaaatagatgtacttctgcttttttgcataatgccaatcccataaatttctcaaaaaaccggcgggaacgtcagcttaattaagccgagcgcctccgttttaaacaagcatatagcttgagataaattaatttgctgattgttacgctgatggtgaacgatgaatactacaggaacaggcatgaaaagccggtattatcagatgccaaggcacatcggtagtgccaggccgttgctgataacccgttgattgattgtctacattctgtttatttcagaatgtagcacgaactacattactgaaatttatccagtagtactaagctaaaactaaaacttccatcgtccataaggcccccgtgatgagaataaagcggtgagatagtaatgcttgaacataataaatagcaagtagatgtgatggttttcattactacatatgtaacaggatgaaaatatcatttttaaacgatatatccataaattaaaatggagaggtgatattgttagatagacaagacatcagaaaactgaagcctatatagttaatttgaatgtatttttaaaattgagtaaatataattaattttctttgagttacgattattcttgacggaaggggcaccgcaacattatgaattacccccgagcttacaggaacctcgggggcgggggcagggctacttatcagcccaaattgatttcagcggccagatggtcatcgtagcaatcgtcgctgagttgccttggctgtaaacctcaatgcctgcgctggaaggatcgggaaatatcagatcggtcagaactacttcacctttaccggaaaaaacggtgactgaggatgtatcaacaataatgcgtaatttcagtatgccgtcatctgaaagtggcagtggggcgcggtgtttggcagcaaaacctgaaaagaatgtgctttcacccgattttgtccgatccagatagagttcgcctgccactgcatcataaccgatgagggtttcttcaccctgtgcacctttacggactttgaaaccgacttctgtagcatgctccggtttcaattgcgcctctatttcatacacttgtccttgcacatcaaaatctgccaacagagtgtctcctgccgagagcaccgtctcttcttttaactggtagagcggtttaccacgcaggcttgtcatgctttcaaccggggcctgggtgagtttgacgtggtcccccaccgtttgcagcttcaactctctgaccaaggtctgtccaccgcgccaaggagtggtgggtacactaccggcataatcccaattgcttatccaaccggcccaataacgtttaccatcaggagcgccgttccaggaaacggcagcatagaaatcggagccaaaatctgcccagttggcggtttgttttggttggtcagataagaggatttggtcaaccagtatatgaccccagccaccggtattattatcaataacctggatttgagcattctcccctttgagtgatgcgacgttccacgaccgccagccaagggcttcagaatttgagccagtctcgctatagatgatgttgtcattaaccagcagatttaccgtggtttcggatgaaatcggtttagccggtagatctgaggcaataaagtggtcggccagaatatggccccagccgccgctgttgtcatcaataatggcgatcctggcctgctgcccttgatattcggcgacatcccaattgacccagttcagggcttcgctgccatttccggttgcgctccgcatgacctctccatttaccaacagcaccaccgccgtagccccacttttgccatagggattattgccgccgccgatcaggaagttgatatagggtttttcaagggtaaacgcgggagaggtcaatgttcctattgccgaatctccatcttctttattgattaatttgccaaaaaagctgtttaccaggtgtgaacccaggaagccggtgacttgctgctgatcgccaatggtgccagtggcaacctgctgattgacaaaatcaccttcagctgtccatccgagttgactataggtcaccttttcatcaccttcaaaatctgcacctgagaacaatagatcacccgctggcaattcggttttcagggtactgtcagcaacgtggggatggttgcctccgccaaccataaggttgatatagttatcggtaattttaaacgtcggggacgttacggtgccgattgccgcgtcaccatcgacgaaggtattcagcaacttctcaccctgataaaggcttaccccattctgacctggattattaccttgcgatacatagctatcaaccagatctcccgttgcggtccatcccagtgagttatagtcaccttcgaagttctcaacaacggcgccctctggaggcgtgctgtcaaagacactgttgtcatcagcctcaaaggtggtaccgttaaaattaccgacaaaatactgcgagcccgaaccgccaaccggcccaccagggttaaggttgatgaccatcacccacttcctgtttgtgggatcaccatcgacggggagttcgaataaatcagggcactcccacacgccagcagtggcatttattggcccgaattcactcataaactcccattcgcgtagatttttagaagaatacaggactgctttatgctgggtggcgagtactgcgaccattacccattttttttccggttcgaaccagaacattttaggatcgcggaactctcggaattgatcttcatagccggttggtggcaaaggcaatactggattattggcatacaactgccaagtgcggcctttatccaggctataagcgagagattgtgcctgagtgcctgcctcaacggttttaccgtttgccaatgtcatacttgccggataatagctggtatacatggctatcatggcgggtttgcctggctcacccaagccgctggtgttatcgatatcgacgacagcactgccagagaaaaacatctgagttgcctttccctcagcatctttctcaacggctaaagccatgggtagctcttcccaatgtaccagatcggtgctgatggcatggccccaggacatgtcgccccagccattaccgttagggttgtattgataaaaaagatgatattccccatcgtaataaactaatccgttaggatcgttttgccagtttttagctgcggtatattgtaattgaggtcgatacttttccaggtaagaggattgaacatgcttatcatcgtttgggcgattactgttagttgagttatcgcaaccgtaaagcagtgtggcactgactgcgatgattaacccaggggaaagtttttttttcataggatgaccgtaagacataacgttccttgtagtaattttgttaaaaatggacgaggggaaacaatatattcacccgctcattgtatttaacttctgttatataaatattatatctaacgcgtttttttgctttaaaattgaaacgattcagcttttttataaataagaccgaaaaaaatttatgcattactgaatcttatggattgaaactgcaataaaaccgctagccaagcaagagggtattttttgtttgtgacgcaaatcaaaattaatttaattattatcgtttcattgcttttttattgtgatttaagttgaataattggttgggtttgctgcatgattaatgtatcgattcagctttcaatccttttatgatagaaaagggcgggcattaggcttcaatcttgtcatgtagtgatgtagtaccttgaataaaaaggggctgaagccatttttttagtgtcagccattgacgctgtggattaataaccgctcaatcatagatatcgttaatcctggcgcgcagtgctctacttgtgtggcgacgaggtaaaatgcaaagtactgaaaatgaatctgcaagcgggatcgcaataaggaaaacttttctctctagccagtgacagtgctgggggatttgttaaaatagaaccacttaatcaaaataagattattattatcatgcagttaactctggtttttcgtcttgtccccgtgttgcttttgctggccactgcggggtgtcagcaaccacgttcttctctgcaaaagggtccgaccccccttaatgaacaggtagaacagctggcgtcggtggttgctggtaccaagtatttaaaatataagtgcaatcgtagtgatttacccagcgatgcggtcattgacaaggttgcctacaaagtcgccaagcaacggggatggaatagctctagctacggggctttgccgcagcgtagtgaggaaatttatcaaagcctgatgagagacaacacgccggaacaaaccaagtgcagcagctttaacagcctgttggcaccttttaccgccgaactgcgtgcagaaagcagcagttagtgaagaccaacttgatgtcctgcgccaagtgacgggatggtggtaaggtttattctgatccttcggcggcgctttctctatcaaccttgccgcccggccaatcctcgagcgcgtcaagtgtgaatacttcgccattgaagttaaagatagtcacgtcctgttgtatttgctcaatcgtaaggttgggggccgggctgtcgccttcctgataacgctgaccgttcagcgtgatgctgcgcttgtcatcttccgatgcgtaaatgtgcgcgctataccttaaaggggctaattcatcactggctaaggagggggaggcttttttatctgatcccacttgttgcgccggtttatttttatcatgcactgtttctatatcagcgttggggaccgtctgcctggacaccactgtttttaccgcggcagagggggcaacttgagctaacgcgggggctgcgaaagcttcgttgttacgccagtgctgtgcggaaaaccaacctatcgctattaacaacaatgcatatactggcagcagatagcggggaataaacagccccttggctggctgggcgctgatttctggctctactatcgatttattgtccacatccctgaacctttcattgacgctgatttctacagccagaggttgttttattggcgtgtcgccaatactgtggcaacgccaaagtatgaagggtatatcctgccagaaaactcgggtcaatagctttgtacttatattcaggattgatgtgactccgttggtttaacctttcgttttgggccacctgatagtgacccgaaacggaccgttttatttactgcttacaggcaatcctgagccttgggctgcgagttgttgtttgaccaacaaggccaccgaccaggctggtactgtaacgctgccctcagcggtaatattgacgccggaggcgagcgagcgggctcccaggctttgttggatcgtgctcagggtgaggttttcaccggtaaagtcattgagcgttctggcttctggcgcagcgttgatgataacgactaacgcatcggcttggggatcaagatcgtttccggcctgaaccccgtcatcaatggtcatcaccagtaagccaagttgctgttctgcacctgtgttacggaaatcgacacgcttcatcacttcatggccgctacccaaggcaatcagaggcgaagattggcgcagttgggtaagttcctgatagaacgaggtcatctgcgcgatctctgtttgaccaggtgtggcaaccgcatcttttacgctggcgatcagcgaatagttgtcaccatcatcgctgatgcgtggcataccaacattgaagttgttgtcttgatagctgtaatccacacggttgtaccagtccccggcatcatatgagtcacgggtaaatgacttggaacgcaagagttctgaaccttgttgatcgaatgccagcccttgacccaacaacgtcgtggccagtgacaccgcctgcatgcggacgcgagtggtgagatcggcttcacgtgcggctttgtaactgatcatatcccataaggtttggttgtcgtgtttggaaacatagttgaccacttcggtcgggtcgttggcatagcccccaatcgccccgttatagtcaatttcgctgcctttcctgacggagccatctttatcgatcaacaggaactcagccaggttgccggccatgcccagacgggtcagatcggccagatggcgcacggtatcctcattttgctgggttaactcgttagccaatactccagcgccgttacccaccccctggttttgacgcaaggcatcaccagagtcaaacgggccgcctccacgaacagcatcacgcaggcgatcggagaaggtgccaatgccggtgccttttaacgtgatctgcgaagcgatttcgaagcgatcgtcctgaccagaattccaaccctcaccaaagaaataaacgctggggttcaccgattttactttctcccgggcagccaggatttgtgctttcggatgatagcccatcaggtcaaagcggaatgcatcaatcttgtagtctcggctccagaccaccagagaatcttcaatcagtttggcaaacatacggtgttcgggggctgagtcggaacagcaggtggccgactctacactgcccgtagtttcgttcaagcgttgataataccagggcacgattttatccagcaccgaggtacgatccgttgggccagccgcattggtgtggttataaactacgtccatgatgatgttcatgcccagttgctgcttgatggtctgcaccatggtacgaaactctttgatgcgggcagtgccttcgggattggtagcgtaagagccttcaggcaccgtgtagtggaacggatcataaccccagttgtaggagtcagtctgagccacatagccattcaattcctgcacctgcgggttgtcctggctgtcattctgtttcagttcttctagtacatctccgatggaggttgaacttccacagtagccggcaaaacggctttgcttaacggcgctgttcagttcacaaagccgactgaatggatgggtgagatccgccactttgtcgttgaactcattgacggttgccagatcgaacaccggtagcaattcaatgtgggttacgccagcttgcccaagctgcctgagatgctgcaccatattgctatcggtggcagtcaacgccagatatttgccccgcacctgttcaggaacggtctgatcccaggcggaaagatcgcggatatgcgactcatggatgaccattttggcaatatcagcctgactggtctgcgggtgtggcatggtcaggctgtcccagccttctggtttcaacgcgctgtcatcgagatccacaacctggctgtattcggagttggtggagaggctatgggagtaagggtcggtgacctcatactgctctactttgcgcgattgcggatgataaacggtcagggcgtaacgataaaaagcgtctttaaggtcgtgacttccttgatatgaccaggcaccggaatcgttatccctggtcatcggatggctaccaatgacttttttatccgcactgtagatcaccagttctgcctgttgggccgttggtgcccagactcggaaagtgacgccagaatcggtcagcagagcaccatattccaggctttccgcagcggctgagaagcgatcatcgagcacgccagcggtctgtacctgagtcgctgaaataagaataccgtcctgattggcagccagggcgacggtctcgccgctaagcagttcgtcgacttttgcattatccggcaacttgaaggcggcataacctgaaaggtgagggaaacgcgatcccagttcctggctgatgctggtcggtgtcagagaaagatagcgatcggtaaatttcccttcgctgttggcggccactttgccactgtggttatagtacagacgtacgataggtttcccttccccggctggccatagcagggtgtgtttatctacccaatgggcttcagccagagctaccccaaaggccgcgcggaaagcttctgcacgggtatcataaagcgtgctgctacctgcaagggtagaaacggtcctgtccggaaaatcactgaacgataaacgcatatccgcatcaatcagcttgttggtgccatcacgcagaatgaagttgatacacccagtgtttttggtcaggggtaacacccagtacgggccataactgtcgctgcctgtcggtgttgtactggtgtcattccagtccccagaggggttatccagggcgtcacaggtgtcgttattccacaaaaacaggttcttggtactgtaatctgcggcggagccactggtgataccagcaatatcgaccagatgaattcccgcctggttttcacctgccatgacggcttcgccaggcattgctatgtcaggcagacgtgcaatcggctcttggttgttggtgtcggggctaacgtctgaagaattattattatcacagccgcttaatatgacaagcgagccgaaaagtagggcattacaggtatttttcagcattctaaattccctatcaggcttacattatagaaagtaaaaaatggtatcaatgtgtaaagcagtggtattagatattgcataatgaggaggagcatcctcctgctttaggaggaggaggggcgtaggtggaaggaggaaccgaagtttagaggagggagataaaaccggttaaaccacttttatgctagcgagattaagaaacaaatagctataaaaacagaaagataaattatttcgataagtaaaaataatgatttattatttaggggagtatgtataaagtaaacagttctgagaggatgtattcagaaacgtaagggcagacagcggtactgagttgtaagattttagtcataatcttacatattctcaaacggcaatgcccccaccgatatgcccaccgattgactgatatcggtgaacttctagctggcgtaaacagagaagcaggcaaaggaaggcaagatgcgattttctgtaatgttatcggtgtgcagagaggctagtttcaggctgttaacgccgcgatgggctttatgcgtgctgtcactgttgatttgcaatcaactcgccttgctcacctggcacgggttcctaccccctgaaatatccctcgtacgcttatccaaagcagacttcgcaccagtaacaacgggaggtggaggtgagtctgaacgttaccgcttcaccctctttggtacttcggcaccctcatcttccgccactgagcattcggtctctgaccaaaccctgcgtaatgcaccgccttcttctctcaagctaaacctgaccggcattgtcgccagccccagttcagagcgttccatcgccattatcgccaaagatagcaaacagttcagccttggcgtgggggagcaggtgcctggttatgacgcccgaattgcgtcaatttttgccgatcgtatcgtgatctcctatcagggcaattatgaatcgttgttgctgttcagcgagcaacccgaggccgctaaaagtgaaaaaaaacccttagcgtcgcagctcaaggcacagttgcaaaagcagccgcaaagcattctcaattacctgaatatctcaccggtgatggtggatgacaaactcatcggctatcgactcaatccgggcaaagaaggggagttattccgcaaggtcgggctgcatgaaaacgatcttgccgtagcgcttaatggcctggatctgcgcgatgcacagcaggctcaacaggcattgaaacagctttcagaactcagtgaactgaatcttaccgttgagcgtggcggtcagttacaggatatctatttggctcttggagatgactaattgttgaatacaaaaataatcaggagcttacgcattgtgctactggcggtgatgctgcttggtactcggcagggctggagtgccgagttttctgccagcttcaagggaacggatattcaggagtttatcaacacggtcagcaaaaacctgaataaaacggtgattatcgatcctgccgtacgcggcactatcaccgtacgcagttatgacatgctcaatgaggagcagtattaccagttcttcctcagcgtgctggacgtttatggctttgccgtggtggatatgcgtaacggcgtgttgaaagtggtgcgttccaaggatgcgaaaaccgcggcggtgccggtagccagcgatgcccagccgggcgagggtgatgaagtggtgacacgtgtcgtgccggtcaataacgtggcggcacgcgatcttgccccgttactccgtcaattgaacgataacgccggggctggcagtgttgtgcattatgagccttccaacgtgttgttgatgaccgggcgtgcagcggtcatcaaacgcttgatggcgattgttgaacgcgttgacaaggtcggtgaccgtagtgtggtcacggtaccgctggcctatgcgtctgctgctgaagtcgtcaagctggtcaccgaattgaccaaggatgccagcaaatcagcgatgccaagcctgatggtagccaatcttgttgcggatgagcgaaccaactcggtcttggtcagcggagaacccaactcccgccagcggattatcgccatgatcaagcaactggatcgtgagcaggccgtgcaaggtaataccaaagtgatttacctgaagtatgccaaagccaccgatctggttgaggtgttgactggcgtcagtaccagtattcaaagtgagcaacagaatgccaagccagcggaagcactgcgtaaagacatcaccatcaaagcccatgagcaaactaattcactgatactgacggcggctccggatgtcatgcgagatctggagaaggtgatagctcagttggatattcgccgtgcacaggtactggtagaggcgattatcgcagaggtacaagacgccgatggtttgaacctgggaatacagtgggctaacaagaatgccggagtgacgcagttcaccaataccggtttgcctatcaccacggcgattgccggagccaatcaatacaatcaggacgggacggttaatagtaccctggccagcgctctcagcagttttaacggtattgctgccggtttttatcagggcaattgggccatgctgctgaccgcgctttccagcagtagcaagaatgacattctggcgacaccgagcattgtcacgcttgacaacatggaggcgacgttcaatgtcggccaggaagttcctgtcctctccggctcgcaaacgacgtcgggcgataatatcttcaacacggtggagcgtaaaaccgtcggcattaagctgaaggtcaaaccgcagatcaacgaaggggattccgtgctgctggagatcgagcaggaggtttccagtgtggctgatgcggcttccagcagcagtgctaatttgggggcgacctttaatacccgcacggtcaataacgcggtgctggtaggcagcggcgaaaccgtggtggtggggggcttgctggataaaaccgtccgcgacagcacggacaaggtcccggtgctgggggatatcccggtgctgggctatctgttccgctccaacagcaaacaggtttccaagcgcaacctgatgctgttcatccgcccgtcaatcatccgtgatcgtgatcagtatcgccgcgcctcctcagaaaagtatcaggcttttaatcaggaacaagaccaacagcgtggcaaacaagggagcgcagccacgctgaacaacgaggtattgaagttgccacccgatcaaaacggtgccactttccgccaggttaatgccgcaatcagtgcattctattcaacggggggacgatgaataccctccccgaggacctgagtgaattacgcccgcagttgccatttgcctatgcgcgcgagcaacgcattttgctgttgcgggatcatgctgggtgccgtgtactccgtctggcggaaaccaccgccacagcattgcttgaggcgcgtagggtggcagggtgtgggctgactatcagtacggtgtcgggtgaagagtttgagaaacaactggtgatcagctaccagcgcgattcgaaagaggcgcgacgcatgatgaccgatatcggcaatgaaatggatttttataccttggcagaagagctacccgacagcgacgacttgctggatgccgatgatgatgctcctattatccgcctgatcaacgcgatgctgactgaagccatcaaggataaagcatcggatatccacattgaaacctatgaacgccatttgcagatccgtttccgggtcgatggcgtgttgcgtgaaattcttcgccctcagcggcggctggcctctttattgatatcgcgcatcaaggtcatggcgcggctggatattgccgagaagcggatcccccaggatgggcgcatggcactgcgaatcggtggccgagctattgatgtgcgggtttcgaccttaccgtctaattatggcgaacgaatcgttctgcgtttactggataaaaacagcgtcagtctggatcttgccgcgcttggcatgtcttcacataatcgacggcagatcgatgaactgatccagcggccacatggcattatccttgtcaccggtcctacaggttcgggtaagagcaccaccctctatgccgcattgagccgcctcaatgccagcgaacgcaatatcatgacggtcgaagacccgatcgagtatgaactcgagggcatcggccagacgcaggtaaaccccaaggtagatatgacatttgctcgcggtttgcgagccattctgcgtcaggatcctgatgtggtgctggttggggagatccgcgacagcgaaaccgctcagattgcggttcaggcttcactgactgggcacctggtactctccacgctgcacaccaacagcgcgctgggggccttatcgcggctgcaggatatgggcatcgagccttttttgctttccacctcattactggccgtattggcacagcggctggttcgtacactccgccccgattgtcgtcaaacttatgcagccgatccggtcctggccgatngccagccgatccggtcctggccgatcagatggggattttacccggaaccccattatggcaaccgaagggatgctcgcagtgtaattttaccggttaccgtgggcgtactggtattcatgaactgctgttgattgatgaccgagtgcgtacggctatccaccagggagagagtgagttcacgattgctcgtcaattacgtaatgaatacaaaacattgcgccaggggggattggaaaaagtattggcgggcgagaccagttgggaagaggtgatccgcgtgaccgaaagccagtctcaggaagagggatgacatggccctatttcattatcaggcgttagacgagcgcggcaaaaaacggcggggagtgcaggaagcggattcagcccgccacgcgcgtcaacttttacgcgagcaggggttggtccctgtaagcctggacgaagggcaggatgaacgccagcaggcccaaagcgggcggcgtctttcatgggggcgggggattagcagtgccgatctggcgttgttgactcgtcagcttgcgaccttggttgccgcttccttacccttggaggaggcgcttgatgccgtggcaaaacagagtgaaaaaccccggcagcgcagcctgatggccgcagtgcgcaccaaagtactggagggacattccctggcggaggccatgagcggttatcccaccagttttgagcggctgtactgtgcgatggtggcggcgggtgaggcttctggtcacctggatctggttctgaaccggttggcggattacaccgagcagcgccagcaaatgcgagctcgtatcctacaggcgatgatttacccctgcgtgctgacggtggtagccatcagcgtgatcgccattttactttccgccgtcgtgcccaaggtggtggaacagtttattcacatgaagcaggcacttccgctatcaacgcgtgtgctgatggggttaagtgacggagttcgagcctttggcccttgggtgctgctgttgctgttattggcgccgatgctgatgcgcctgttgctgcgccaagaagcgcggcgcattgcttttcatcggcagttgctgcgccttccggtgatcggacgcatcgctcgagggctcaatactgcccgttacgccagaacgctgagcatcctcaatgccagtgcagtgcccttgctgcaagcgatgcgcatcagcggagaggtattaaccaatgaatatgcgcgccgccagttgtcattggcaacggaatcggtgcgcgagggggtgagcctgcatcgggctctggaaatcactgcgctgtttcccccgatgatgcggcacatgatcgccagcggtgaacgcagtggggaactggacagtatgttggaacgtgcggcagacaatcaggatcgggagtttactgcccaaatgcagttggcattggggctttttgagcccttgttggtggtgagtatggcgggcgtggtgctgtttatcgttttggcgatcctgcagccaatcctgcaattaaataccttgatgagtatgtaaattcaatctgcaaataacggagagaaaaatgcggcaacagcgtcagcgaggttttaccctgctggaaattatggtggtgattgtgatcctgggcatcttggcgagtctggtcgtgcctaacctgatgggaaataaagagaaggcggaccatcagaaggtcgtcagcgatattgtcgcgctggagagcgcgttggatatgtacaagctggataacagccgatatcccaccaccgaacaagggttgcaggcactggtgaccaagccctcggcacaaccggaaccgcgcagttatccccaaggtggctatattcgccgtttgccgcaggatccctggggggcagactatcagttgcttagcccgggccaacacggtcagttagacgttttctcttatggcccagatggcataccggacaccgaggatgatatcggtaactggactattggtaagaagtagtgcgccaacgcggctttacgttgttggaaatgatgctggttgtgctgctgatcgggagtgcagccagtttggtgatcatgtcatttccggccatgcaacaaaataacccgcagctacagctgaaacgctttcaggctcagttggcgtttgccatggatgcctcggtgcaaaatgaccagttgctggggatccaggttcgaccagatggctggcaattccaaatgctacagcgtcaggccgctgaaaaacgcggggcagtatctggctcggatagttggcaaggttacgtttggcagaattggcaaccccgtcaggcggcgttagggagccaaatgcctgatgatatccggctcaagctgcatttccccgatcggcaggagtggccgcgtgctgtggaatcggcaccggaacccgatattctgctgttacccggcggggaggttacaccgtttgagctggttttcagtgaggccggtagccaacccttggtttggcttcgtgtagatgcaacaggcgcgatcgattcgtcagcaaacggagccgcacaatgaatacccaaagagggatgacattgctcgaagtgctggtggcactgatcgttttcgctttggcggggttagccgtgctgcaaaccacggcacaacaggctggcagcattggccgtatggaggaaaaaatactggcaagctggttggcggataatcaacaggtcaggttacatcttgagaaaacctggccggaaaagcgctggatcggcaccacggtgacctatgcgggcgaggagtggtctgtacgctggcagggggttgataccgaactaggtcaattacgggcactcgatgttgaggtgcggcgtcataaagaagacgctgcgccagtggtttctttacgcagctacgtggtgcgggaatgaaataccgtagccagcggggcttcacgttgcttgagatgctgttggcattggcgatttttgctgcgttgagcatcagtgccttccaggtgttgcagggggtgatgcgcaatgatgagatttcgcagcgtaaggctcagcggttggccgagcttcaacgtgcctttatacagttggaaggggatttcggtcagatcatccctcgccatcacagagggaatgaacgcgtgttttcagcggcgcgctatcaattacaaagtgaggactggggcgtctctttcatgcgcaacggttggcaaaacccgatggggatgttgccccgtgccgagttacaaccggtgggatatcgtctgcgccatcagcagttagagcggttgagctatgcccatacggatccgctcgttggggaagcgccggtggtcaaggttttgctcgatgaggtcagtgtctttcgcctgcgcttttttgctgagggtacgtggcgggagagttggaacaacgcgtcggttttgccgcaggggattgaagtgacattagtggttgctggcgtgggtgaattgccccgcctctttttgatcacggcggtggggcaagaatgagggcgcggcaaaagggcgttgccctgctggtggtgttgctgatcctggcgctgatggtgacgattgctgcgaccattgccgagcgaaacgggcgcacttatctgcgtaccgctgctcatttggatcgccagcaggcaaaatggtatgcccgctcggcagaagcactggcggtgaaaattttgcaacgagatgcgctggactcacctaataaaacacatttggcgcaaaactgggcgcaagaacagcgccgtttccccgttgaaggcggggaggtgtttgggcagattgttgatggccaggcctgctttaatctcaatgccattaaccaaggggctgctactgaaggtatgcagccgacattgccttaccctacccaggtttttagacagctgctaatcaacctgggggaagaccctctgcgtgcgacgcagatagccgcggcactgcgtgactggatagacagtgacagcgagccaggcattgatggcgctgaagatgaggtctatatggcccaggcggtggcttacttgcctgccaatcaatccatgcaggatgtcagcgagttgcggaccgtctctggggttgatgccagcctttatcggcgtcttttaccttacgtttgcgcgttgccaacacaaacgctgctggtaaacgttaataccctgagtgagtctcaaggaccattactggcggcgctatttctcaaggagcttgattcagccatggcgactcgattgttacaacagcgtccacgtgaagggtggagcagtacgacggcatttttggcacaggttgcccttaaggacatcgacacctcaacggtcagatcgctgctgacgataaagagtgagctgtttttagcccgtttcaccgtgctgatgggggagactcactatagccagcgcagcctgttgcgcaaggccggtaacagttttcaggtggtacagcggcaatatggattaagcatgatggtggagccttgatgcctaacagaaagccccgtgagcaagccaggttgatactgcgcttacccagcgatgaaatgcagccagtgctgtggtatttcgcttcagcagacggtcatcagcaaggtagtttggctatgggggagaacgatgagcaattggtgagcctgcttgccagataccctgcctgggtattggtgcctgcgagcgagttggttttccatcgtgtgacgctgcctcgtcgtgccaggcgtcagcgtttgcaagtgctgccgtttatgctggaggagcaactggcaacggaggttgaacggctgcattttgccattttgcagcaaagtggtgatgagtgtgacgttgcggtagttgataaaagccttatgcatcagtggatagcccgttgtgaacgtctggggggacaggtgcaggcaatgttgccagatgtgctggcgttacccttggccgccgacggttggagtgcggtcaatctcaatgatcaatggctgtttcgccgggaaaagcatgccgggatgattgttgaatcctcctggctatcggagtttttggccgtgtgggcaccgccggtcattgaaagctactctgcaccaccagcatccactactagcactccggaatggcgtgttcaaccaccgcggcatttactgcagttggcggcagaaggcgtgcacgatagcggagccgatctgcgccagggcgaattcacccgctcgagcccctggcgtgctcgattacgcccctggcgaaccgtgatgatggcattaacagtgtatttactgctgttgtgtgtgagcgccgggctatctcattaccggctttggcaacaggctgaacattggcggcaggaaagtgtgcgggtctaccaacagctgtttccggctgataaaaaggtggttaatccgcgcgtgcagatgcagcagcacttgcagcaattacagcctatcgagcaagccggtgtggtcgcacagatgcgccaattgcaacagctgatggcggaaaactcggcaatccggttccaggcgctgtcttatgacgctggccgtaaagagctgaaggtcgatgtacaggcggcctcttttcaggcgttggaacagtttcaggttgctgccgggcagcattaccaggtgcaacctggcgaaatcaagcagaatccaactggggtagagggccgactgactctggggataaaggatgaatgaactcaagcaccgctggctacagctcagccttcgggaacgaggtttggttctgggctgtggtgtattggttatcgtgagcttgtgctactacgcactatggctgccctggcaacaacaggctagccaatggcagcgtactatcgcccgtgaaaaaaacacggtggaatggatgttgcaacaggctccgcgcttgcgccaacagggggcacaacccatacaggagacctccctaagcttgtcggccagggtggcacagagcgctgtagctcaaaacatgaacattacccgcatgcagcctcagggagagcggctggcggtcacgctggaacctggcgattttaatgccttgatgctttggctcacacagttggaaaagcgctatagcgttcgcattgtggcgcttgaggtggcgatgcgtcccgataaaccaggatgggtgacggtaaacaaactgatgctggagcgcagcgatgggcgctaaagccaaaaaggccgtgcttttgttggcttgttatctcctattgctgggaggccacgcgccagcacggatattacaagtttttatacccgcagatatgaaggtcggtggcttttctggttccctgtggcagggcagtttgcaccagttaagctggcgtaacattatgctggcaaaactgaactggcagttcactttctcctcttggatgccagccttagagattgagctaagggatccgcaaggcttacagggagccggaatcctgcgtggttggctggatcttcaactgcatgagtggcaactctctgttcctgcagatgttgtgcgccaacagctgtcgttgcctttgccgatcaccgcccagggagagctgcaactgcggttgcaacaaggagagttcagttccgctggttgccggagtcttggcggtggtgtcgtcaactggcagcacgcacagttggcgactccgttgggggcgttggagctggcaaacgtgcaaggccaattgagctgtgatggaaaaggggctctggtgttggtgttgaaacaagactcctctcatctgagcctgacggggcgtggcaccgtcggatttgacgggcgctatcagttcaacggtcaggtgcgccgagggccggtattaccggaggcgatggggccactgataaatcagttaggcagggctaacgatcaggggcagatagcctggcaggttcaggggcggttgctttaaaacggactggctgtcttaaaaggttgggtaggtatttgcctgactgcggggaggttttttgagtttattactggattttactgttgcatttccccttctctggctgggtgtcgtggggatgtttggggccatagtgggtagctttctgaacgtggtgatttatcgattaccggtgatgctggagaagcaatggcagcgcgaggcgctcgtgcaattggcgctgcccttacctgaatccataccgcgctttgatctgctattaccgcattcctgttgcccgcattgtcagcatcctattgcggccagggacaatatacccctgctgagttttctgttgttaaaggggaaggctcgttgctgtggtgagcggatcccaaggcgctacctgctggttgaagtggcaacggctatgatgtttgtgctgacggcgcttatattcccgctaggtttccccttgctgggggcttggatattgctctcttttttgctgacgctggcagttattgaccatcagacacaactcttgccagatgtgctgacgttgccactgctgtggatcggacttttattcaatattcaggggcattttgcctcgttggaacaggcgacgattggcgcagtggcaggttatgtctgcctatggagcgtgttctggctatttaagctggcaagcggtaaagaggctctcggctatggtgattttaaattacttgcggcgttaggggcctggttaggttggcaagcgttaccacaggtgattttggttgcagcggccagtggtctgctggttacgttgatacagcgagggttggcaaaacaagatcttaatcaaccgttagcctttggtccatggctcgccgtgtcgggcgcggccaatatgtttttaccctggagcttttaagcacctatgccttgattagaagcactggtaagcgcacccagtcttgttactgaagtacggcttttgctagttggttggccaatgatcaaaattttttatgtgttacttactgatactaaagggaataattatgcataaggttacgatgttggcggtgttgcttacggggatgcttaatgctcaggcggcaacggtttataccggagataaaattgggggtaatccggttatcagcaagttggatgtagacgatctggaggcaggaaaggtttatcgcttcatgttccaggggaccagcaatgggatcggtcaacattggtatgttcccgttatggtggccaaaggcgcacaacctggtcctaagctgggtctacaagcggcggtccatggtgatgaactaaatggcacccgggtgatacagcaggtatttgaaaagctggatcccgcagagttgaaaggcagtgtgatcggtgccgtgggcgcgaatccttctggcatgttggccaataaccgaaactggcagttggccaatgacgggggggatatggtcgatttcaaccgggtctggccgggcaaggaaaaaggtaacgccgccgaacagcaggcttggctgttatggaataatttgtgggcgggcaatgccaccctgttcgttgatatgcacacgcagagccggggtaccgaatatcccttgttcatctatgcggattaccgtaacccgcaggtgaagcaaatggctgaattgttcccggcggaccagattaaagccgatcctggtgagaaaggctctgtcgaaaccaccttcgttgaaaacaagatccctgctattactctcgagattggcaagcccaagctttatcaacctgaacttatcgcgcgtagcttgacaggggtgcgtaacctgatggttcaacaaggcatgacagccggaacattaggggcaacggctaaagagcaaaaaacctttatcggtaatgaaatgagctcgatccgagctgaggttggtggatttaccgagattctggttaacgtcggcgattcggtggtcaaagggcagaaagtggccgttcagcgtaatgcttttggcgacaccattcgggaatataccgcgacccatgatggtcgagtgttagctatcggcaatgatccattgcgcgaaccgagggctttgctggttcgtatcctgttcaacaatcctgagcctcagtgtgccaatggttgctaattgacattaggcatctgtaaatgtcgggatcacggggtggcctgctgcaacaatctgcttgaagcccagtggatctatcccgttggtgagttgatcacacatgacatgagcttgcttgcccaggcgagtgccaatcggctggcaacgcctgccgattggcggtttcctgatgattagagttggttatgcccagcgtttgataacaatcgaggtgttgataccaccaaaggcaaagttattggtttgcagaaactcgcagtcgatatgacgggcttctcccatgatgtaatcaagtgcgccgcattgttcatcaggggtacgcagatttagcgttggtgcgaaccagccttcacgcatcatctgcagactcagccaggcttccagtgctccacaagcccccaaggtgtggccgaagtaacttttcaacgacgagatcggcacgctgtcaccgtagatcgcggcggttgcctgactttcggcaatatcaccccgatcggtggcggtaccgtgggcagaaatatagccgatatcacttgcttgcagaccggccatcttcaacgactgctccatgcagatctgcatggtttcacgttgaggctgtgtgatgtgtgccgcatcacaattggtggcaaagctgacgatttcgccgtagatggttgcgccgcgtgcttgcgcatgctccagctcttcgaggatcagcgtacaagcaccttcaccaatcaccaaaccatcgcggttctgatcaaatggggaaggggtggcatgcggttcatcattacgttggctggtggcaaataacgtgtcgaatacggcggcctcggaaggacacagttcttctgccccaccggcaaccatcagggtctgataaccgtggcgaatagcctcccaggcatagccaatggcctggctgcctgaggtacaggcgctggacgtcgggatcacacgtccgcgcaggccgaagaataacccggtattgaccgcggtagtatgaggcatcatctgcacataagtggtgcccgtgatgttattggtgtgcttctcggtcagcatggtggcgaattcgctcaccgggccagtactgccggtggatgagccataagcgataccggtctggccgttggttagcaccgggttaccaagaagcccggcctgctccagagccaattccgttgcgcgggtcgacataagcgacacccgccccattgagcgtatacgtttacgggtatagtgttctggcagcacgaaatcatcgattggggcgcccagcagagtgtgcaggccgtcatagacttgccattcaggcatgtggcgtacggcgtttttataggccaacaatttagcggataccgcctgccagttttcaccgaaggcggtaataccgcccatacctgtaataactacccgacgaatcattgcatccctccgttgatagaaatgacctgacgagtcacgtaaccggctatatctgacatcaaatagctggcaagcccggcgacttcctccgccaggcccatccgtttcatcgggatcatcgacatggcttcctttaacgctgcctcttccatttttatcatgccggtatcgatcagccctggggcaatgcagttgacggtgatcttgcgttttgccagttctatcgccaacgctttggtggcgccaataatgcctgctttggccgcactgtagttcacctggcctcgattccccatgatgccagaaacagaagatagtgtaaggatgcggccaccttgacgttgggcaatcattggcatgatgcagggctggatcacgttgtagaaactgtccagattggtgtggatcacctcatcccaatcatcatcgctcaatgcagggaaggcggcgtcgcgagcgatcccggcattgctgacgatgccgtaccatgccccattctctgccagatcttgctcgaggacctcccggcactgctgacgattgctaatgtcgaaacaaagtaggcggccttgtcctccggcagcggtaattgcggccagcgtttgttgtgcaccagcttcatcctggtgatagtgtatcccaacgatgaaaccgtcagcggctaactggctggcaatagcacgtccgatacctttgctggctccggtgatgagaattgaacgactcatgcagtagatccctgattaaaaagcattgttgattcttctggtgtgggctggaaggtattgacgcgaccggtggccagcgtgtcaccttgcgcgccaataacacagtcaaaactcccgaaacggtcatcatgtatcagcagcttgatttggatgtctagcattgcatctgctggtaggtaacccgcggcacagaccaattccctggctccaagcaccataccgagggcgatccgctgttctcctcgctgatgacgatgccacccggaccaaacgccgatggtttgtgccatcaattccagtgcgtaccaaccaggcagctcgccttgcgcattgaggaacggagccagcacgctgtcgctcctgacctcaacccggcaatgtgcgctgtcttccgtcacgctgataacctctgccaacagcagcattggggcgtcgtggggcagatattccgccggtgataagtaatggctcatgccatcctccccagcaggatgctggcgttattaccgccaaaggcgaaagagttagacagaatgaccgggcgcatcagcggttcagccgcatgcagtaaaccacagggcggtaatgtcggatccgccggagaatggctgaagtcttgcgctggcagtggcaagtcatagagcagaataagcgcgctaagagccgcctcggtgatgcccgcagcccccagggtatgcccggttaaatgtttggtggagctgcagggcacgctttcaccgaacagatcgtgaaccactttggattcgatctgatcgttgagcaaggtggcagttccatgcaggttgatgtaacccacctcttcggggttaagccccgcgtcttgcaatgcctgttcaatggctcgcaaggcaccggcaccctgcggatggggtgccgaaatatggtatgcatcgcttgactcacctacccccagcagcgcgatggggttcggctcgcgggtaagtaccatcagtgccgctccttcaccaattgtgatcccacagcgatcgcggccaaacggctggcaaagcgtagtggaaagagactccaggctattaaaaccgttgataggcatgcggcttaaggtatctgcgccgccaacaatcgcgatatctgccaggccagcttcaataagacggcgcccgctgatgattgcgcgggcactggaagaacacgcggtggaaagagtaaacgcagggccattcaggcccaaccaagcggcgaggaagcgtgacggatcgcccagctcttgttgtggatattgccagctcgggctctcttcatggttagcaacatggctaacatgtcgatcgccttcatccagcccagaggtgctggtacctaacactacggcgatgcggtcggcgccaaagcgaagcagcgcgtcatctacaacgggctgaatttgcgccagaacggccaataataattggttattgcggctgcgatgtgcggcaaaattgtctggaatagcgggtaattctccgtcgacgccgcctaataccgcgtcctgttggttctgtaaccaatgctcacgcttgcgcatgccgggcgctgttccttgggtcaggttggctgcaatctcttctgtcgattggcccaaagcgttaatcatgccgatagcagaaatgtaaatcatatcagtcatccagatattgaatggtgatgtggtatttaaacgcgtgttgctcaatgctgataggttcacgacgatctttacgttgcaggtacgtgatctccgttatcagtttgccgcgcgcgttgcgtaattctcgtttgtcgcccttatcgattagcgtccagccctgcggcaaccgatcttgccaggcggtaatcggccagtggccgagcatcacatcggccaagacctgactggctggcggcagttgtggcaccacgatcgactgctcggtatgaatgccgttatcgtcataggtaacgagaaataagcggatacctaacgaagacagcccggccaaggtgagtgcattgctatccgcatttagaatgaccaacaacgactgggttttgccgttaaagctgccagtcaataattgctgggactggatatgctcagtgataccaggagccggtagcgtgacgcgtacgccgggttcaagccaggcttgcgggcgggagccattctcattatgcgatgagtggctacagccggtaatcaatagcacggccaacaggggaaccgcgcgccagaagtcgcaatttgtcatttttttctctgcttacggtcaggcatggcgagtggggatagcaagaaagcggtaaagatcccgctgaccaggacaattccaaaactgctgatagcttgagtgctgctaaagaccagcatgcccagggttaacaacgttgtcatcattgccagcgcgatcgccaacaacgatgtcagtggtgtgccgcgtggattgctgaagaacagcgtatagttaatgccgatccccagcaccagtaccagcgccagtagcgaaaacaggttcacggcatgtccgctaaaggatagtgtggccagtccgatgctcagcgacagcagcgaaggcaccaggctgattaatcccttacgccaaccgaggcggaacaccgcactgcaagcgatgaccgccagtgctaccagcagcaggccggtaagtatggtgcgatagagggcgaataattcgttgaacgtattcttgcgatctacccacactacgcccggttgtttttccgccagtgagctcagagccgtgctgtcgttaacgccttctaccggtaccagcacaccgcttttgccattgggcaatgtcaaccacatcaagcgccaaccttcgctggctggactgttgagccaatcctccaacgttgcaggtgcggtttgcagatcgggcgtgacgtccgttaaccctgtattttgcaatgtacggatgactgtaggagcggcgctctgcaacagagcgagatcctgtttctggcgtgcgagagaatttaacgggatcgtgcgaaaagcgctgataacccccgtctgacgtgcctgttccagtgccggtgtgaagccttcaagccgttccagggtttgctgaggagtgttgccgtagaccacaaaccatttttgatcgacgctttgcccggtgagctgcgtaatggctttttcctgcgccaggacatccttcggcagcgcctgcaactgggcaatatcatcatcgacgcgtaatgtcgctatccccgcaagagaaaccaaagccaatacgacaggtagccccagcgacagtttgcggttatgcctccaggctgcaagccagcgcagcagggagatcgcggcaggaatagggcgaactggtaaattgcgacataaccacggatgccaaaagatcaccgtaaggcatgaggcgctcaggcccacagcggcaaacaccgccatttgtcgtatcccagggaagggagcgagcatcatgatcagataggccgcgacggtagtcagcaatgccaataacagggcattacgcactttgagcagactctgccatggtgatatctcgttaccgtgcaccatgcgttcggtgaggtagtaaagcgtatagtcggcagagatcccaatgatgctcatgctcatcactagcgtcatcaggtgaagctcaccgaagatcaacaacgtagctgctgttcctgccagtgcaccgatgccaacggaaatcaggcacagcagcagcgggcgcagcgagcggaaaactaccacgatcaacagtattacgcccagtatggtggcgacccccagcgtagatatgtcctgttttgcctgttgactggcataatcactgtaaaacagcgtcccacgtgagaggagcttggcttgggggtagcgcgatgtgagttgatcctccagcgcggcgagcgtagtgacgactcggtgggtttgttgcatatcaaatgacgatcccgtcaattcgccatgcagaaaataccagtagttccccagttcatcttgagtaaccaaccagccgtccatcaaccgcaaacgctggctgttctgtgccagagccagctgtgagccgcgcatcagcattagcggatcgttgcgtaactctttgccgctgacgccagagaatgccgaatagagctgagaaaggacccactgtgcctgggcatcgccgccgttttgcaggcgctcacgcgttgcgttgtcgatcaggccattacgatgctgccagaaaaaatcgccccaggcttgttggtctgcagcacccatcgggcctttcaccgtttctgctaacccggatttttgcaactgggtgagccagtattgcgctacctgcgggtctgcctgttttccggggctgaccagccagaccaactgcttgtccaggcgctgcataaaaccgtcgttcagcgcgggaggaatggcacccaatgcctgcttgggcaacatcgccaatacgctgctattgatccgggcctgtggcaatagggcaagcagcacgccagctaatatcaggcatgcggctccccataacagcgcgaggcgtttggcattagtaggcggcaaaacgttgtcgctcttcatcggtcaaagctgcgggtagcagccggtgttgagagaaggtgatttcagtcagatcgccctgtttatcgtttaaatggatggtttccagataggtttgtccactcagcactatagtggcaaaaattcggtccagaggggtggtcagtggggttaaggatagcgtccagcgaccctcaccttgctcctggaaatcaatacggaaatttttctccagcacctgacgatcggcctggaatagcgcgcgcagcagatgattgaactgaaacatctgcgggttgttttgtgcagtaataacctgcggttgctggttattgatgatttgcaccatccgtgagtcgttgagcatcaacgtcatggcaaagggggtttgctgttgccacagcaaaccctgatcgcgggcgatcaccatttctccttgggaacgcagtggttgtggtagatctttgatggttctagcctgagcaaaatgggctcgcactaccggttgttcggtaaaacgctgctgtaattcatccagcgtgatggcattgacccatggactgatcagcaggaatagcagaggccaggctttcatggctgcacccccagacgttcgaacagtatgtccggacagacaaagcacatctcacggcttttttcctctactgctacctggatggtgtaaccggttgtggtgcgtttaccgctgtcggcgtcaaaaatctggtaggcaatgcgcaggcgattttcgtattcttccagcgtggcacggacgcgaatacgttgttcaaaggtcagcgtatcgcggtatttcacgcgggtatccaccactggccaaacatatcctgactctttcatctgccgatagccgtagttgaattggttcagcagggcttcacgggcaatttcaaagtaacggaaataattgccgtgccacacgactcccatcatatcaatatcatgaaagggaacggtcagttctatctcgctggtgaaacagggatcgtttagcaccctttgctcctgtctgtggtattggcctgttggtcaggcagttgccaaaaattgaaaaagttgaaccaatcgagtggtgcctgcaacgcgtagtgttcaagacgctcagcatactgatcaaccgcctgttgcaaggcgacttgacgatcggcccgcggtaacagcagagggtcggcaaacggctcgcagtgcaaatgtagttttccctgctggcgcagggcatagatcagcaacacaggacaacgcaatatcgaagccagaataaacggcccttgagggaatggggctggatggcccataaagcggctccagataacccggcaactatctcctcgctgcggtttgaccgcgatgcgatcgccaacgatcgccacccattcgccacgatccagtttgtctttgagcaatatggcggtatctgggccgatatcggtcactggcaacaggttgagccctgcctggggcgctatctctgccataatctgtttgaaacgctgggcgttgtcgttgaacaccagcgcattgatggttttgctcacttgcagttgtgccaacgcccggcaagcttcgatatctcccaaatgggaggccagcagcaatttgccttgcggggagccaatatccagcgtggcttcggcattgggggcgaagacaacatcctgccctagccgcatttccccacgccaactggcgattttatccagcatggcatctgcaaaacgtaaaaaatggtgatagctgtttagatgcgcaggaatggggagcgaacgcgaagtcaactcgttgcgtacccgcttcagccaggcttgtgaagcctgacgggcctgatgtgcgccaagccagtaaaccgtcaccaccggatagagcagtggagcaatggcctttctacccagtaagcgccagatagcaagcatgatgcgcattccccacaaccccttgatttctttctgacgtgcccagtgcgggttggatcgacgaaaaaacagggtagggatacgcggcaacatgccgaagaaaaggcgggtatgcatcagtgaaatgcgcacgttatccttcaaggcatcaaagtgtgacaacccatcctgggggtaggtgacgcgcgttggcacaaagtaactggtgttcccctgccagtagaggcgaaccattacttccgtatcgaagtccatgcgtttgcctagcgccgttttatgcgccaactccaatgtaggggcaattgggtaaacccggaagccgcacatgctgtctttgagctggagagagagcgtctcaatccacacccagaagtgagttacccagcggccatagcggcgcgacgctggtatggagtcgtcgtaaaccggttgtccggaaattaaatcctggggatgaagctgtgccagggcaatcagcttgggaatatcttcaatggcgtgctggccgtccgcatcgacctgtatcgcatggctaaatcctctgcgttgagcctcttccaatccgcgaataaccgccgtgccttttcctgaattgtgtgcaaggcgtactaaggtgacatccgcgtgaatggtggccaggcgctcaagttcctgctgggtggcctggtcgctgccatcgtccacaaccagacaggccaagccgaagggttgcaggcgcgctagcacgcttgccatcatggctccgtggttataacaggggatcaccacacaagggttaaacgtgccactattcagcgacataatcggatcttcccgctgctggctgtgctacgagcctcaccatcatggcgttgatagcggaaaaccatgatttgccgctcttcctgccagtcaagcgtcagcgtgacgatgttatccggcaataagggctgttggaatttgacactttgaatactgtgaaagcgaaaatcgggtaccagcagtgaggtggcgtagtgcatcacccagtctagttgcgtcacgccgggtagcagaggctgcactgtgaagtggcctttaaaccagaatgaagccgcatccagccgtaacacgatctcggcctgctgttgcgtctgatggcgagccatctcatggggtctcatgaaacaattcctgtaattgcgcatagacgcgcttgttcatgctgttgacgggcatctcgtcaacgatacgccagtaacgagggatagtgacaggttccagccacgggcgcagcgcacgacgccatgatatttccagtgctttgccgcccattttttgccactgttgccgagcgtggtcttcaagcaccaacaatgcgccaatgccttggcgccctccgcgtgttaccggtagcgctgcggcttcgcgtacgccttcgagttccagtagccgttgctcgatctcgcaaagtgaaatccgtttctcttcaattttcaccacccgatcgcggcggcctgttatctggaagcgtccactatcgtcaaattgcaatatatcgtcgaggagcaggccgtgcctatcgctgataagcggagagatagcccggatctcgtcggcgtcaaccatgatacgcacgccagtgaagggctgccaggttacatcaggctgttgatggtgacgccaggcgaggatcccggtctcggtactaccgtagatttcgtctggccagactcctaaccaactggcggtctgagccacgctttcccaaggcaatactccccctgcggagataaccatattcactggcggtggcgtgagctggtggtccagtcgttttagaaaagccgggctgctgatcaaggcgtattggtgttgattatccagagttgccaactgctcggtgtaatgaagcattgcagcatgcagcggtaatcctagcgccatgggtaaaaagatacggaaggtgaggccgtaaaggtgcaacggaggcactgaggccacaatatggcagccggtgagcctgtcggcaaaacgttcagccagtaaggaggcttcacgatcgaggcaggcaatgggtttaattacacggcgtggttgccctgtcgagccggaggtaaataattcgatatggctggccggatcgagagtggctagcggcggcgggttctcgctactttgataggcagattggacctggatcagcgaaccgctccaggtcagtgcctggtcggtcagtacgccgttaaacagcgcccgttgttcttccagcagcgaaacacgactatgtccgggaaccacgggggttttgcccgcatgcaatgttgccaatagtccgacgataaacagatagctgttttcaaaacacagcgcccagcgatcgccctcatgttgttgcaggatattcacctgtgccgctacgtcatggcgcaactgccccagcgtccagatatgtccatcaagccaggcaatcggggtttcattggcacgcgaagcacttagccacttggccatagggagtatctgattcatgccttgtctcgcaatatccgcctgcgacgcaccagccattcgccagccatcagcgcccccatcaacagataggcaatcatgccgttccacagcgtccataaccgaatgtcacctagcagaacggtaaaaagtgccattgagccgttcagaatgaaaaacacacaccatatctgggtgaccttgcgggtataacgcacgcctgacggggggagctccggctcctgcaaacgggcaaggcgctccaccattggcatcgagctccacagtgaactaccaaatacgccgagcatgaccagattgactaccactgggtaaaatagcagcagttgatgcgtttttagcacatagctcattaggcataatgtgagacccgcgagtgccacggcttgcagtacatagcgcatcgggccgcgctgacttttgacctgataaaggcgaaaggccagcaacaaagcgatgatcggcagcagccagtgaaggctgttgcgtgtcaggccaaaccagacaagaaatggccaagccagtagcgccagtagagccaccagttgtatccctttcagggaccgagcgccgcgcataaacggttatgcttcttgcaatagctgttctaccgcatcgacgacatcttgtacggtacgcacctgcttaaaggtttccggcttgattttcttcccggtcttcttctgcaggtgcacgatcatgtcgacggcatcgatactgtctaactcaagctcttcatacaagcgggcctcaggtttgatgtcctgtggatcgatatcgaacagtttggtcagcagcgcggacacttcctgataaatggtttgttgttctgtcatagcgggctcttctcaggcacgttgagcttggataaaggatgccagtgttgccactgaatagaaatgttgacgcatctcttcattttcggcggaaagcgcgacaccatactggtttttaaccatcagccctaactctaaagcatcgatggagtccagccccagtccttcaccaaacagcgccgcattggtgtcgatatcgtccgcagacagttcatccaaattcagtgtatttattatgagatttttaatttcaaggtggagcgcttgcatcattaattcctgacaaaggtataaggcctggtgataactgatgcaaaagatgccggtttagctgccttgcggctaatgctggctgttgcgattctgcatcaaaaaaatgttctatctgtacccgttcacgcacgtctacctggaacaggggtttcctgggcggaacgtcataccatctgctctgtttatcaagcagatgctcgctacagtggatcactgctatgcgcacgtcacggcggcatcgtacggcaatattggcggcaccgcgctgcagtgtcatattttcaccagggcgtgtgcgtgttccctctggaaaaataagtatggtgtcgccctgtgccaggcgttgctgacaggctggaagtagcgtgtccgcctggctattgaccagataatccgcagctcggatcactccgttcacaaaggggttatgtagcagagcgctttttaccaggcagtctgtctcgggcatcacggatgccaaaagcacataatcaatcagtgtcggatggttagcgaccaccaaacaaccgcgctcctggcgtaatatatcaatccccttgatgcgataatccaacacacccaacgtttttgctatcgataggaacagccggaaactggcggcaatactgcgccgggctacccggcggcgcttggcaatatcgcgctgtagtaccagcagcagattaaaccagacaagcgacagcagcaggccgccgacgccaaacagcacaaagcaaaagccggtcatcatcagacgccaagcccagtttaaacgtgcgaatgggccgctcatgtacggctccagtaccacttcagtctttcacccgcgatggtgaacgttggctcttcggccaggtagtgttgtaaaaactgtaaactttgcggtagcaggggctcttcccctgtaccttctggcttgctctcacaccgtaacgtattcccgcgttcaaacaccagcgccaccgcataggcccaggtcggcatctgctctggcaggtaggtgtggtaaaactcgggcagcaagccgtcaaaatcgaccattaatactctctggtaacccgcttggagtaaacacacgacctcacataacgcttgctgaaaggtatctaggccagcagaaagtgaagatgataccagaggattttgtgccgtgatggtcaagtgacccacggctgagttatgtaccgacatggtgaaatcagttggggaaaccgcttgctgggtggctatggcctgcaaaattcggtaattacgctccaactcaccgtgacgactggtataaaggaccgcatccaccggttgacgacgtagcatggctaaaccgcattccacggccagcctgctgcctgaactcaggcggcgtgctgtcatcatgggaagttcggtcagcttcgattgcggcgctgagggtatgatcccatagggctcctgcgaccattgacgccactgcgatgcgtcgcttagtccgggggccatagcctgccaatcaacgatgttcaatgcaaaattcatcaacgtgcttccgcggttactcggtttggactgtgtcatctccaaggtagcatgagcgctgccctatcattattgctttcggcatactaacaaggtatgtccaataccaaggttatcgagacgtttttctactcggaaccctgccgtttcgaggaaactgtaaaatttaccggcgctgtaaaagcggctgttgccgttagccatgcaggtaaaatagagtgaggaggcgttgaggctgaacgaagccgcttcaaatttttgcgcatcccagaacagctccataatgcatagctgagcgtcaggcttcatcacccgcttgatttttttcagaatactaataatttgttccggggaaaaacagtcaagaaactgactcatccaccagatatctgcaccactgggtaatggtgcatcacttagcatatctaccgcatggaaatctatgcgatgagataacccggctttttcgacattctcacgcgccagactaatttgctgcggcagatccagtaaggtaatgctgacgttatcatcgtactggcaacaacgtagcgcccattttccagtattgccgcccacatcataaagcgttgttggtttattgttaaatatatggggtagtgcggcattaaatgcggcatctgaatagtagtgatcaaaagcaaaccagctttcacgtgcagccttgggcaattgcgataaggcagggtagatggtcggccattcaccaaacacttttaaaccagcgggtttctcttccttaagcgcatgttctaaagaaaacagcccctgataacaaacatcttgagtgaaatccatattcacacgggtcatggcatcgtggagtaggaagtgccccactttggcaatgaagtaatagccgttttgatgagtcacaatacggccacttagccccatatccaacagcacactaacggcatattcattaacgctgctattggcagcgatgtcctcaaggagggcgccgtgttttccttgttcatccagataggctaatacacccgtattgcgcagacaaagggcggtttgaaacagcattggagcaaaggcaatccgttgcgcctcagtgatagcatcaagtgcactgagagtgtcctgttgatacatttgttgtacaacctctttaaccggatacaaaatagtgacgccagcttgtatccggcgctaatctactcaatattgaaaattacagtgcggcaccggccgataaatttaactggatatctttatcgaggttgtgtacccagcggttgtagtttttatgaattttcccacccgaggctaacaggttgaggctactggcgtaatcgatggaataattcgttgcggaataggtgatgcggatttcagcaacatgatcgcgagcctggaggcggccattaatgataccagggccagcctgtgtcataacccattcacgttgcacacctgctttcaggattgcagttctgacttgcgcttcggtatggccagtactgaccgtgctgttgatttgttgtattggggcagtacgcacacaaccggtcagagtggcgatgacggcaagagcagcacaccatttaacgatgtttttcataaaacaatttccttttgttagcgggttacaacctaggggaaactgagcggtttaattttttaattaacgcccactgtttttagccgtgaatttatcaacgcataatactgatatcaattaaattgcacaagatggatcgggggaaattacttaggaaaagtctaactttaagcctggttttcctagaggattaaaccaaaattttcagcattaatgcctataggtagtggttcgtttagcgtgttttttgttaggaaaaaaccatggtgccataggaatatgcttattttttgaggcgcacatccctttatccgataatggtacacccgcagtgctggtgggcggccagaacactccctcattgctggcgctaaatgagaggccatcatttgatggcctcatagagagtttaaagtggagccgaacgcaaatgctttctgctacctaacagtgcccagccgctcagcagtgccatcatcatcagataatagcttggtgccaggctggtcccggttgcggtgatcagcagggtgcagatcagaggcgcaaagccaccaaatatcgtcaccgccacgttgtagctgatcgccataccgctggcccgtgttgccatcgggaacaaatcggccatcaccgaaggcaccgtcgagaagtagatggacttcagcaaggccagccagccaaccatcaacatcagcatcattggcgaagtatggttcaccaccagcaggaatgccgggtaaatagtcagcaacagcaggatcagcgaaccccacattaacggcaggcggccgactttttccgcccataatcccattatcggggtaacgaccgttaaaatcacaccggccagcagggttgcactaaaggcggcggaaccggacaggttcaagtttttggtggcataggtgggcacataattcagcatgtagttgatggcggtggaaatcaccatcagtccaatggccaacaacagcagatttttttgattaccgaccagcatctttaacggtgcttcgggtttctgctgctgtacgaaactggctggctcatgtacatggcggcggatatagagccccaccggtccgatcagcaacccaaaagcaaagggaatacgccagccccagtcctggatttggctttctgtcagccagtgggtcatacctaacccgaaggcggaagccatcagcgtgctggcgccttgcgtggcaaactgccaactggcgataaacgccttgcgctccgggaagtgttcgaccagaaaggcggttgaactgccaaactccccaccggcggaaaaaccctgaatcaatcgggcaatcaggatcatcagcggagccgccagcccaatggtggcataagaaggcataaaggtgatgatcgcaccgccaagcaacatcaggctgatggacatcagaagtgccttcttgcggccaacccgatcggcgtaggctccgagcaccacagcacccagtgggcggatcaggaatgagacaccaaagctcccgaaagtcagcaacaatgaaacggccggatcctccgtagggaaaaaggcgtgggcgatatagctggcgaaaaagccataaaccgcgatatcgaaccattccaacgcgttgccgatgcaggtggcaaacagcgttttatacaaattgggcttggccgctacgctatcctgttgggctatcgcgctcatgaggactctcctgcccggcgttgtgccaggatcgtgctgccattttcgcccaactcccagaacaggcgagtcatgatctgcaatccttcacgagcgatggatttcagcatatgctcattaaccccgtgttgaccacaggctggataggagtgggggatccacagcgtgggcaatcccaacgtatcggcaaacacatcattaggcagcgatccgcctaggttggggagtaatgcgggttttttgccgctggtttgttgcaggatctcaagtgcccagggaacgagtggatcttgtggattgagcctggtggccggtgagccgtgcagccattccacctccacatagccaaagccgtgtaattgcagatgctgctggatatggttgaccagatttttccagtcggtaccgaccacaaagcgcagttggcatactgccgtggcgctgccgggaatggcgttcattggccgagccgggttgcccgtttgataggccagcacttcaagcgtgttccaaccatacaggcgctcgcttggggttaggccagcttcaccccagctctcatcgatcgccggatcgccagcttggccgccaacgctgagatcgcgcaaaatggcgcgtaggttgtcatccagaggggcgggtttcagcgctgcaacctgtaactgaccgtgttgattaaccagagaggcgatggcattagccagttgtgttccgggattgctgagtaatccaccccagttgccagagtgataggcgttatccctggcgtggatgctgaggcggaaattgatgcagccgcgtgagccaaggaacaacgtgggctgtgtggcgttcagccgtgggccatcggaggcgataaacagatcggcttgcagcaattcgcgttgttgctggcaaatggccgctagcccaggggaactgatctcttcgcccatttcaacaatcaacttgcagttgaaccctagtttacccccgcgtgcatggaaaacctgctccagcgccgccaggttaatactgtgctgccctttgttatccgcgctgccacggccgtaccaacggtcgccttcttcactcaactcccaaggcgaaaggcctgcgcgccagttttcgtcgtcgccgaaaaccacatcgccgtggccatagctcagcagggtgggtaatgcaggatcttcaatgcgtacggcgatcagaaacgggcggttgaccgcttccgggttatcgaacagttgcaactcaaaacccagtgcccgtaacggcggcatgatttcctgttcgagatagagcaaaatgccggcatcgtcgtcatgccgctggctttcggtggccagcgcgatgcgccgcgccaatatgcggcggaattcgccactgtcaaaatacgctgtcgccaaagcgacggcctgttcacccgtcatgattatttccccgttgtgtttgcgttgcgttgttttacttgttgtgtttgttatctaagctaaaatcggggtttgccacaattatccatttaacaaacaagctttgctttaaaggcaacggtcgtttgctcgttggcaagctttgcaccatggagagggacggcatgttgagtagcgaggttcgcttttttctggtagtcgccaactgtggttcactcagtgcggccagtgaacagctgtttgtggcggtatcggcgatcagcaggcagatccagcgcctggaggtacaggttggcacgccattgttcgaacgccacgcgcgggggatggtgctgaccgaggccgggcagatttttgaaaaccatattcgtaaaagcctgttgaatattgagcaggcggtggcagaaatcaaagggttgaaagccgaacggcgtactgcgctacgcgtggcctgtagtaatggagtggcctttatgctgatgccacaactgatggcgcgttttcgtgcagaatacccggctgtcagcttcgtgctgacagtggcagatactaaaacgttggcgcggctggtacgcaatggcgagtgtgacatggtgctgcagtttagtttgcacccagaacggggcgttgaggtagcggcttcgtggcccgccccggtcttgttgttgatgagaaaggatcatccattagccgacaggcaggtggttctggcggatctctgccagtatccggtgtgtctgccagagccaggctccacggtacgtcagctgtttgatatctcttgtcagatgaatggcaccttcattgaaccagtgctaacctgcgataacttctccacgctgtactattttttacagggttccccgatggcggtgaccatctgtagccagtttaccgcgatgccgttgttgcagccgcaaggattgatcctgaaaccttttgctgtcgagcagcaaagcccgcggaccttgcaactacaattaccactggggcggcagcggagcacggctttggagctgtttgtggactatattaatcagacactaagtcgcgaagaacgggctattggtgagaaattcggcatgtaagccgttttttaatcgacaagataaataatctgttgattacgcttgattgttccagtctggctgtattatattgcgctccacggaaacagtaccccttccgacagatttcgccggcttagctcagtaggtagagcaactgacttgtaatcagtaggtcaccagttcgattccggtagccggcaccatataaaagacctcagcagaaatgctggggttttttgtctttaggcatccatgatgcggcgcagccaatgaccgcgcccttggggcctttaaatatcagtggccagccattggtcagactcttcgaacatctcttccagcatacggtttaacttctcgcgatcacttttgctggcgtccgagttaaggccgttggcctgcatgggttttaccttcacctctgcatccgggaagatacgatgcacccgttttgtcagctcagccttgatgatttcatcggcaccggggatccctgcgacattacgcttatcaaacaccaattcaacgaacatagcccaaccctaacgttactgtttatgtatacagttattttgaccgaagggactgggtgagtgcaagagggggaggcgaaaattttatcgtggccaacgttgagggaagcgtgctctaaagctgccgatctagctattacgcactatttgccacggtatccgtggctgaggttaatagtatagagtcaccttgaaattgataatcattcttaatatgcagcaaaatttatccataattattagaaagttgtgtgtcttctttctctcaggtatcttcttgaccttcttgatgggccttatcttcattgacgtgcattggctgcataactttgtctccgagacgtcgctcaccgaggtaacccaagagatcatactggtggcgatagccctcagcttctttatctccgcttatcgtcagacggagcatcggtatgccagggtattaattggtggcttcttcctatgtatgttgattcgcgagatggactttgtgttcgatatgctgcggcatggtgcctgggtgtggtttgccttagccgtaacgctgatttgtgtgctttatgcactcaaagagctgcccgctacgctacgtggactagcacatttcttcagtcacccaagttacggcatgatgttttccgggttgttatgcatattagtattttcacgtctgtttggtatgcaactgctatggcatgagctaatgctcgatgggtataaccgcgtggtgaagaatatggtggaagagggctgtgagctatttggctatgcgctttgcctgtttgcgacggtgggttatctccgaagaggggcgtgaagtgcaccgcccatcaaaatcgagcgcataggtgtttgatttttagctgcttgtgtgccaatcacggcacggcgcgttgtacgtcagcgcaaccgagttggctgtggcagcttgctattgcaatagcatactaattgtcaaggtatgaaccgttggtttttatcatgcatattgatctttgcgcgtccgtttgaatgcactcatcataattgagtgcaaagatgatcggctgtgcaatacttcttttacatgtcataaggttattatttaagctgttatatttaaaactttttcaaaacggaattaatatcatgaaaaaaacgctactctttttaggtatgctgtcggttggcaccatcggcgtggtgacttcggcagttgcccaagatgctgagaacaaaagggcactaaagccagcgattaatttggcagagttgtttgctgaaaagtctgctatatggtcgacttatccagaaaatgatgcctatgtttttgaccgttctgaggaaagctatgctgtcgtcgctaaacgagcggatggtgttgttgctctggtcaataaacaggagagctatacgacccctgggaaaatggtattaatggggacctattttaactgcaataaaatgactgatgcgactttttatgttgaagatgtcagtgtagacgacgtagccaagcagcttgctgacccggctattgatgatccagagagagtgcgtggttttgatgcgagtatgcccgtccacgatctctatatggtcgcctgcccgcagagttgaaattcgttggcttattaatcggtggtggtcgctgattactgatgtgtttgtgaaccgtcacaatggcaccgctatccaaggcaggccagccgatcaacatccctaccggggggagagcccccggtttgcaatttctgagtaatagactacctttactaaggcagtctaattatcatttaaatcaaaggaattgttatgattaagaaagcgttagtaatgtctgtctttgctctgggtatgatttccttcgcttccgttgctgctgatgctacagctatggcacatgaagacgcagcggttaagcatgaaactgccgcgaagcaccacaagaaggcagcaaagcatcataaagaagggaaacacgaagaggctaagaaagagtcagcaatggctactgaaagctctaaagcagctcatgaaaaaaccatggcggctgatgcagaaagcgccaagaagtaaagtttaatggtgctgcccctatttcagttttgtaatgcgtgctgagatattattgccggtataggggtagcgctccgcactcgatggttacccgttagttaagcgaacagtcatgttcagtgcggccctatttagaagaattaatgccacacccaccaagtgattatgttgaaagcagctgccgatatcagaagaactactgtgattaaaatatcggtgtcgatgtctgacttcaagaaaaaatccttccgtggtggcatcaagttatgaaatatagtcactatccgcgagtttgcaattttcacgtctgaaatcagtcatcagcactttcccacgtttcctgcagtatttcctcgatcgcttttctatctgtcggtgtcagccgcttttatgttgttatggggcataaatgaggctaaaacggaaagatggagttaaaacataggataagcagacttggtaaaagaggctcagtactgtatagacgtattgaactgaatcactcatttcgccggcaattttatcatagccaaattcaaggcataaaaaaaccaaccctaagcggttggtttttctataaatagttggtcggcatgagaggattcgaacctccgacccccgacaccccatgacggtgcgctaccaggctgcgctacatgccgacgcagaaccctatactaccgttttcagatgtaaattcaagcagctacctcatcgattgctctagatttaagcagttagttggcgataaagcgttttacatcggtcagcacctgtaacagcagcgctagctggggtttctcgtctttgatctcgttatcgtcctgatcgtaggcacggtagttgccattgccatccaatgtcagcgtctgtgttggcgtggtgatccccaacgggctgccgtccccggtggcgagccaattgtttttacgctgtgcggcaaacaggtcttcgccctgcgagtagtcgttagccggtgttttcacatgcagcagacgttgcatcaacgtacgcatcacatcgttatgattggtcaacttattgatggtttgtgctggcgtgccgggccagtgaataaccaacggaacctgcaactgactgcggttaaagctgctgcccgctccccagttgcctttgccggtatcgttgaattctataccgtgctcggcggtgatcaccaccacggttttatccagcaggcctttttctttcagcgttgccagcacctgctcaatctgtgcatcgacgtctttcgcgcctgtacgatagagttgggtaaaggcttccggcgagagcttattgtcaccttcggggaactttgcaccgctgaaattgatataggagaaccaagggctatttccgctctgagtggctaaccagctctgccattgatgcgtggtggcagcatcgctctgcacgaacggttccggcgggagcgagaaatcggtcaagagcgcctggcggtaaagcgtggcgttgaaaccatctgaagagaacaggccgaactgatagccttgatcgctcagtgcgctaatcaacgcggccggtttgcgcccggccagaatgccatccagataggtaggtgaaataccgtagaacaggccaaacaggccagtgtccgcatggttaccggagctgtaatggtcactgaagcggatgttttcctgggcaaagcggcttaggcccggcatgtcttgcgccaaatcctgggtacgcacgccgttcaccacgatcatcagcaggttgtagccgctgcctttatcgctgtagttcaggctattgagcgggtattcaacggccgccgcttctggattgccctgttgcatcaggcggcgctcatattcttgctgatcgagcaggccgtgtttttccaggaacttacgcgcagtcattgggtaagagagtggcagggtggcgcgctgcatggtgatcggccgatagaaattggcatccgcccagatataaatcaggtgcgaagcaaagaacgaacagatgaacagcaccgccagcggtttaccgaagttgcgccggttcaggctgcgcagtttctgccagctccaggtcgcaaacaacatttcgaccaggaatatcaccggtacggcgataaacaccaactgccagtcgcgcgccagctcactttggtccgggttgatgaccaactcccacaccaccggattaaggtgcaggtggaagtgggtaaagacttcgctgtcgaccagcagcaacgtcagcccagtggtggccaacgtcgcggaaataaatcgcagcaggcgctgcgacatcaccacaaaggtgagcgggaagatgatcagcaggtaggcggcaaagacaataaagctgaactgcccaatcaggctgaccaacgcatagactcgccccagcagtgaggacggccagtcggtaacaaacaggtagcggctgcccaacccgatactgagcagaatgttaaataaggcgaaccagtgcccccagctaatcatctgggagactttttcacgataacgctgacggtttgtcaccataagtaattattaatgcgctttatcttcacggatagaagcctgcagggcttcagcaaacgatctggccagtgtcttccgctgtgcgggagcaatactggtgttgatcaaattggttaccatgttgcccagcaccatcaaagagaggtcggtgggagtatggtgtttttccagaacgttgaccagctcagagagcagttgttcaacgtgttcgtcactgtaacgagatgattgtggcataaagattgtgctcaaagctcgacaaagtcccatatcttaccgtatagagccgtgattttccgctcttttatagcgtgaagatcgttaaggtattgccatgcccgttgtctttcggcttcgtcagtgcttgaatacgcgctcaaagaacaggaggattgatcatgagtctggatatcgagcagattgcactgcaccagttggtaaaacgcgatgagcagacgctggaagtggtgttgcgcgattcccttcttaccaccaatgcggcggtggaagagatgatggcagagctgcatcgcgtttacagcgccaagagtaaggcttacggcttttttaacgagcaaagcgaattggcggacgcgttgcgcagttgtcgtaagggtgatgaagatttcctcgcatttagccgtgctgctaccggccgtctgcgcgacgaattggccaaatatccgtttgccgacggtggcgtggtgctgttcgcccattaccgctatctggcggtagaatacttgttgattacggtgctgaacagttgcaacagtacgcgtgtcaatgaagagttggatatccgcactacccactatctggatatcaaccacgcggacattgtggcgcgtatcgatctgaccgaatgggaaaccaacccgcaatcgacgcgctatctgacattcctcaaaggacgggtagggcgcaaggtctccgatttctttatggatttcctggcggcgtcggaagggctggataccaaagcgcaaaaccgtggcttgttacaggcggtggatgattactgtgccgatgctcaactaggcaaacacgaacgccagacggtacgtcagcaggtttacagctactgtaatgagcagttgcaggccggtgaagagatcgagctgcaggagctgtcaaaagagatagccccggtgggtgagaaggatttcctgcagttttccagcgaacagggctacgagctggaagatagcttcccggcggatcgcggcacgttacgccaattgaccaaatttgccggcagcggcggcggtatcagcctgaactttgatgcgatgctgctgggggagcgcattttctgggatgcggccaccgataccctgacgatcagaggtacgccaccgaatctgcgcgatcagttacaacgtcgcacgggcggcaagtaagcatcgctgaaggaccgccaataaaaaacgccgcaattgcggcgtttttcacttcggcgtcccgaaaatcgataacgtggcgattaaacgcgaacgaagtcgatgtgagccagttttggcttgaacgggtgacgctgtacagcctgaaccttaactttggtttctttaccgtcgacaaccaaaactactgcttcgctgtagaattctggtttaacttccatgttctttacagaatcatggtctagttcgatagcaatcgcagcttcttcgccaccatagatgatagctgggaatttgtttgctgcacgcaggcggcggctcgcacccttaccctggtctttacgtacttgtacgttgatagtgaacattgttttttctcttaaaagaaaatttaccctgctacaggcgacccagtaacaggctcgataacctgctttcacactgggcgaacccaggtaaagcgggcggcattttaacggaaagccgctcgctgggcaatgaaaacctgccgcacggggctaatacagctcattggcacggcgaaagcggccctgataatcaaaaactttttcacgtatctgccagaactggccgcgtttgcgcgcgacgacgaagtctggatggcgcagcagcgcctgctgagccagaatgtccgccgcgttttgccaaccgaaggggacgccaggtgcccgttggtgcgggcgcaggaacagcatctcgaaggctttgcgttgtgcgggcgtttgcaggcggaaccgttcgctagtactggtgccatcttcgtcataataggtggctttcagccattcccctttgtcgtccttgccgctttgcagttccattccgccacagcgcaggactagcgcatccttcagtttcagcgcggctttcagcatatcgtccggatcgaccagaacctcctggcactgatggcagcggcgtgccgcaatatcgttctctgctccgcagtgcgggcagcatttgaagcggaagcggtagtcacattgctcgcgatgcccctcatcatcttccagccagccctgacagcggcggccgtagtgctcgatgatgtcgccgttctcggtgcatttgccccaaaacaggttggcaaaaccgcagccagggcaaaagacctgcaccggttggctgtctgagtggggtttgctgacgccgacttccggcgtgaacaaatcgtggggattgcctgcgtagtccaggatcaggcagtcggtcttgcctggggccagccgtaaaccgcgtccgacgatctgctgatacaggctgacggactcggtggggcgcaaaatagcgatcagatcgacatgcggtgcatcgaaacccgtggtcagcactgccacgttaaccaggtagcgcaactgctgttgcttaaaggcttcgattagcgcgtcacgctcgcctggcggcgtttctgcactgaccagagccgcttccccacttggcaacaagccatgcacttcacgagcatgttccaccgtggaggcaaaaatcatcacgcctttacgggtttcggcgtattcgacgatctggctgatgatgtgcggcgtgatgcggttttgctgtttcagctcgcggttaagatccacttcgctgaacaggccgttgcttctggcctccaggcggctgaaatcgtactgcacgatcggcatatccagccgttctggcggcaccaggaagccgtgtttaatcatataacgcaacggcagttcataaatgcagtcgcgaaacaggctgttgccgtcgccacgggtgatgccgtggtagtgatattgatagatccagccttttcccagccggtaaggggtggccgtcaggccaagcaggcgcagttgcgggttggttttttgcaggtgttgaataatctgttggtattggctgtcgtcatcgtcgctgatgcggtggcattcgtcgacgatcagcaaggaaaatgcgccgtcgaacagcgacaaattacgtgctaccgattgcacgctgccaaacaccaccttaccgctgctctctttttgctgtagcccagcggcgaagatgtcggcctccaggccgtaagcgcagtatttgctatggttttgcgccaccagctctttaacgtgggctagcactaacacccggccacgggcgcgttttgccaactcggcgatcaccaggcttttgccagcgccggttggcagcacaatcagggccggttcagggtgctgtcggaaatgcttgatggtggcgtcgaccgcttccaactgataggggcgtagggtaaaagccatgcgttagtaccgctcgctgaagtgggctgtaacattccactgaaattgtgacattttgctcctcagacggcggaaaaatttctattattatgccttctgcggctacgcagtgcgagaagcatggaaattactcctgttatggcatcgtttccgtcgctatactaagcggcttccctacgcgaacatcctcttcgaacctgttttttgcacctggtgcgacaacggggcgtcatatttagcaaccagatcaatgcgatcataacaacgacaggcaaagcagattcaatgcgactggacaagtttttatctcagcagttgggtatcagccgtgcgctggtagcgcgtgaactccgtgcaaaacgtgtcaccgtagacggtgaagtggtcaagagcggggctcttaaactggttccggaacaagaagtgcggtttgatggcaacgtgttgtcacagctgaacgggccacgttacttcatgctcaataagccacagggttatgtgtgctctaccgacgacccggatcatccaaccgtgctctatttcctggatgaacccgttgcatacaagctgcatgcggcagggcggctggatattgataccaccggcctggtactgatgaccgatgacggccaatggtcgcaccgcatcacctcaccgcgccaccagtgtgagaaaacctatctggtgacgttggaacatccgttggccgccgatactgctcagcagttcgagcaaggcgtgcaactgcataacgaaaaagatctgaccaagcccgcgaagttggaaaaaatcgaagataccctggtgcgtcttaccataagcgaagggcgttaccagataggttttctcacactgncaggtgaagcgcatgtttgcagccgtgggtaaccgggtcatcgaattacaccgtgagcgtattggcgccattgtgttggatgacgatttggcaccgggagaatatcgcccgctgaccgaagaagagattgccagcgtaggcgccccgcacctgctggattaatttttgcgaccgaccaaggagtcgttgaacgtgcaacagaaccggacctctcacctcggtttgatctttattctgggcctgctgtccatgctgatgccgttggcgatcgacatgtacttgcccagcatgccgataatcgctcaggagtttggcgtggagtcgggccgggtgcagatgacgctcagcgcctacatgctgggctttgccgttggtcaactgttctatgggccgatgtccgacagcattggtcgcaaaccggtgatcctgtggggcacgctgatttttgctatcgccggtggggcctgtgcgatggcccaatcggtggagcaactgatcaacttgcgtttcctgcacgggctggctgcagcggcggcaagcgtggtgatcaacgccctgatgcgtgacatgttcaccaaggacgagttctcacgcatgatgtcgttcgtgatcctggtgatgaccattgcgccattgttggctccgatgatcggtggcgtgctgctgctatggttcagctggcatgccatcttctggaccatgggggcagcggcgctgttggggtcggtactggtggcgttctttatcaaggagacgttgcccaaggagcggcggcaaaaattccatctgcgcaccacgttgaggaatttcggctcgttgttccgccacaagcgcgtgctgagctatatgctggccagtgctttctcgtttgccgggatgttttctttcctcagcgccgggccgtttgtctatatcgagctgaataacgtttcaccgcagcattttggttattactttgcgctgaacatcgtgtttctgttcctgacgaccctgatcaatagccgcaacgtgcgccgcctgggggcagtcaaaatgttccgccttggtctatttgtgcaattgacgatgggtgtatggttgctggcagtcaccgccagcgggctgggtttctgggcactggtgctcggggtggcggtttatctcggctgtatcgccatgatctcgtctaacgcgatggcggtgatcctggacgatttcccccatatggcgggaacagcctcttcgctggctgggacgttgcgcttcagcattggcgcactggtcggggcgatactgtccatggcaccaggcaaaagcgcatggccgatggtttcatcgatggcgctgtgcagcatcgttgcggtgttgttctatttttatgccagccgcccgcgcaataaccctgcctgatttgccccnnnnnnnnnnnnnnnnnnnnnnnnnnnnnnnnnnnnnnnnnnnnngttttatcgttactgagctcacctttgctcttccaatgaatgagccacatgttaagtcctgtacctgatctccgcccttgatgttactgaacgaaccacagactgacttctgcacttgattacagctctggcccagctccctctccttggtgagagggagatcaaaggcaattagaccccaatctacccgcttgcaagtttaagtttgttgctaaatatatgcaggctaactaaacggcggtcaaacgaactgtagtttttttgttaaatatggcagcattattttgtcaggtggccagaggtgcaacccgctggttggtggggcgttttcttagcggttaattggccttattttattttaaatcaaagtattattgatttaacctgccttgggtgtttgagcgatatgtttgcataatgtaaaattataccgattgtaaagtaaccgcattgcaagaaaaaaatgttgagatcgcggcgggaaagggttacatataacgcaaaaatgcgagctgagtcgcaaaatgccgtgagagaaccttctacggtggagaaaaactgagtgatatcagcaagcgcaggatgcagttaattgtttgttgcaaattttacttaaaaataacatttgtgggcggcaaagtcggatgatcccggctataactaagtcatcctgtgatgtaaaaagtgtttcatcttttcatactagggatttcatgtggatagtttccagctttcggtagtgcatcgcttgccgcaaagttatcgttggctatcaggttttaccggcagcaaggttgaaccgataccgcttagcggcatagacgaagataacgatctgatcggcctcaagctgctcagccatgacgggcgcgaagcctggcgggtcatgcagcagctcaacctgtctctgcaagagatccaggtcaattgctccatcgttgaatgggaaggcgagccttgcctgttcgttcaccaatgcgatgagagtgccgccatgtgccgattgaaaaacgtcggtgcggcgattgccgagcagctcagcgcgcagtaccccttctgaatgatgccgctaatcaaccaactgcaataactgctgcgtataggcagcagcaggtgcgttgaaaatcgtttggcagtcaccctgctccacgacttctccctgacgcagtacgatcacctgatggcacaacgatcgtaccacctgcaaatcgtggctgataaacagataggccagccggtgacgaagctgaagtgacttcagcagcgtcaggatctgcgcctgtaccgatttatccaacgaggacgtcggttcatccaggatcaacagctgcggctgcaggatcagcgcgcgggcaatagcgatacgctggcgctgcccacccgaaaactctgtgggataacgatagcggagagccggatccaatccgacttcctccaacgcctcaatcacccgctgttcgcgttgctctgcggtcagttgctggtggatctccagcccttcggcgatgatttgcagcacgttcaggcgtggattcagcgcggaataagggtcctggaacacgatctgcatccggctgcggtaaggtaacatctgctggttattgaactgatgcagtggttggccatcaaaccatatcccaccttttgagctcaacaagcgcagcagcgccaggcccgtcgtgctcttgcctgaacccgattcgcccaccaggcccacgctttccccaggctgtatctcgaagctcagatctttcagcgcgtagttctgatcgacgatgcgccgtaacaggccacgtttgatcgggaaactgacctgcaggtgttccactttcagcagcggcatgggcttattgctggccggaagcggcagaggctcgcccacgtcttccgcagccaatagctgacgggtataggcgtgctgtggggcgctaaacaggccgtcacggctattttgctctacgcacaacccttggcgcatcaccgccacgttatccgccaaccggcgcacgatgttcaggttgtgggtgataaacagcaatcccatccccagttcctgctttaactctttcagcagcatcaggatctgcgcttgaatggtcacgtctagcgcggtagttggctcgtcggcaatcaacagcttgggtttggtcagcaccgccatggcgatcatcacgcgctgacgttctccgccggagagttgatggggataatccttcaggcgccctttggcgttacgtatgcccacccgatcgaggcactgaatgatttcggcgcgagcgctatcacggcgcattcccatgtggagcatcagcacttcagccagttgtttttcgatagtgtgcagcgggttgagcgacaccatcggctcctggaaaatcatcgagatctggttgccacgcactttgcgtagttcggcttccgatgcatgtaacagtgagttgccgttaaacagaatatccccaccgggatacaccaccggcggggaaggcagcaaccgcagtacggagagggcggtgacgcttttgcctgagccggattcacccaccaacgccagcgtctccccttgttccacctgtaacgagacaccgttgaccacctgattcaagttgcctccctggcggaaggcgatgctgagatcctgaatagcgagcagaggagtggtcatattaatgcgccttgcttgggtcgaaggcgtcgcgcaccgcttcgccgataaagattaacagtgagagcaacactgccagcaccaggaaggcggtaatgcccaaccacggagcttgcaggttgtttttgccctgtagaaggagctcacccaacgaaggcgaaccgagcggcaagccgaagccgaggaaatcgagagaggtgagggtggtgatcgaaccgcacagaataaacggcaggaaggtcagagtggccaccatggcgttaggcagcatgtggcgatacataatcacgcgatccggcacgcccatcgctctggcggcacgaatgtagtcgtaattacgggtacgcaggaattcggcacgcactacgcccaccaggctcatccaaccaaacaggatggtgatgcccaacagccaccagaaattgggttggatgatgctggacagcaggatgatcaggaacagcgttggcatccccgaccaaacctcgatcagccgttgcccccaaagatcgaatcggccgccgtaatagccctgcgtcgctcccgcacagataccaatcacgctggaacacagcgttagcgccagcccgaacagcattgagatacggaaaccgtacagcacccgggccagcacatcgctgccgttactgtcggtgccgagcaggttttggcgtgacggcggcgatgggaagggcacttcagtggcaaagttgatggtgttgtagctaaagcggatcggggcccagatggcccagccgtgttgctcaatctgcttgataacaaagggatcctgaaaatcggtagtggtattcagctccccaccgaaggtcgtttcgctatagttgaccataaagggcacatacagccggccctcatagcgcaccagcaacggccggtcgttggcgatcaggttggcggccaggctgagcgcaaaggccaccagaaaaatccacaacgaccagtaaccacggcggttgctgcgaaaacgtgcccagcgggcctgattgatagggcttaagcggctcattgacggccctcgaaatcaatgcgcggatcgaccagggtataggtgatatcgctgacgatattcaacagcaggccgatcagggtaaatatgtaaagcgttccgaacatcaccggatagtcgcgttgcagggtggcatcgtagcccagcagcccgaggccgttgagcgagaacatcacttcgattaacaacgaaccggtgaaaaacatgctgataaaggtggccgggaaaccggcgatcaccagcagcatggcgttacggaacacgtggcggtaaaggattttcttctcgtccagccctttggcgcgggcggtgaccacgtactgtttgcggatctcatcaagaaacgagtttttggtcagcatggtcagggcggcaaagccgccgatcaccgttgccagtaacggcagggtaatgtgccacagataatcggtgattttaccgtaccacggcagcgtgtcgaagttgctggaaaccagcccgcgcagcgggaaccagtccagatagctgccaccggcgaatagcacgatcatcaggatggcgaacaggaatgccggaatggcgtagccgatgataatcagcgtgctgctccaggtgtcaaaggcgctgccgttgtggatggccttacggatacccagcgggatcgacaccagatagatgatcagtgtactccatagccccagggtcgcggaaaccggcagactctggccaatcagctgcatcaccgaggcaccgcggaacaggctttcgccgaaatcgaggcgcatatagttccacagcatggtgaaatagcgttcgtggagcggcttgtcgaagccgtaacgcttggtgatctcggcgatcacttcgggatccaggccgcgtgagccacggtattggccttcggccacgttgcccgcgccagccttcatgtgcccaaggccttcacccgcgccaccgccgccaaatccgctggtttgccccatctcaatagaggcaatggcctggtcgaccggcccaccgggggcgatttgcacgatgaaaaagttaatggtgatgatcgcccacagcgtggggatcaccagcagtaatctgcgtatcagataagcggccaccggaggctccttattgccgttgcgccggcaagcgtgccgccttgttgacgtcgaaccaccagttgtcgaacccgattgaataggctgggcgtaccgctggcgaagagaatttgtcccaataggcgtaacggtcgtgattggagtaccacatcggcagcatatacatgttccaggtcaacacccgatccagcgcacggccaagggacagcaacgctttttcatctccttgatgcttcactattttccgtaccaggtcatctatagctggatcgctgacgccgggggtattccaactcgaggtgatataatctgaatcccaacgggtttgtagtgaggtgctgggaaaaggcattgcagggtacaccgtcggcatcatatcaaagtcacgttcacgcatgcggcgggtgaattgactgacatcgatctcacggatctgcatatcgatgcccaatcgcttcaggttatgctggaaaggcagcacatattggaaattgctaccgcttggtagcatcagctcaaaggtaaagggtttaccggttttgctgttgaccaactgctggtttttcacttcccagccggcctgtttaagcaactcggtggctttcagcaggttagctcgatcattgccgctgccgtcggatgttggaggctgatagatcgaggtaaacacttctgctggcactttgcctttcagcggggccagccaggccagttccgcagcatctgggtagccggtggcagcgtactcggtattctggaaatagctgttggcgcgctgataggcatcgtaatacagcgccttgttcatccagtcgaagtcgaaggccagggtaatggcttcccgcactcggcgatcggcgaaaatcgggcgctggatattgaacgctaaccagcgggcattctgtgccgcctgattggtttcatcctgcttgatgatgaagttgcgtgcaaagttaccgccctgatattgagtggcccagctttttggcgagccttcgacgcggaaatcgtaagccccggccttaaaggcttccagcgccaccttatcgtccaggtaatagtcataacgcagcgtatcgaagttatagcgcccacgattcactggcagattggcggcccaatagtcgcgtacgcgctcgtaggtaatgtactggcccaatcggtagctgccgattttatatggcccactgccgagtggaggaatactcagtggctcattcagtttatgatctttccagaagctttctggcatgatgggtaagtttaataggccgagtagcttatctttatctggctccgggagttctatgcgtaccgtcagacgggagatagccttgactatgacgcctttgtaaatagaacggaattgcggcaccccttcggtcataaatttgttgaaggtgaaggccacgtcggcggcggtgatcgggctaccatcatggaagcgcgcgcgtgggttgatatccagctccatccaacgcatatctgccgggtaacgagccgattccgcaatcaacggataatagctggaaggctcatcgtccgagctggtgaacagtgtatcgtagagttccccggttctttcaccgggtacgccgcgcgaagcgaaacggttgaagttatcataggtgccgatggctgccagccgaacatcgccgcccttgggggcagccgggttcacgtagtcaaaatggctaaagtcggtggaatatttcggctcaccgagcgtggcgaaagcgtagctttcattaagggtttcggcctgcatgctaaaactgagtgccgaaagcaccaaggcagcaaaaatgcgtacggacatctctacggtaagctcctgctatctatacccgtcgcctttcaagccaagacttggaatacgtcggatataagtcaattaatccagccggtagcatagcatttcaggctggttttctgagtaaagaagtttaaatatcagggattaactgcggcccgataatcaaaaacggccttattctggcaaaaggccacaaactcctcaatacccagtggcttactgaaataatagccctgcataaaattaacgtcgcgttcttgcaggaaactcacctgttcggcggtttctaccccttccgccacggtcagcatgttcagttttttagacaacgagatcaccgcatccaggacgggagcggtcgccgtatcctggccgatggtattgacaaaaccgcggtcgatcttgaggtaatccagggtgaagcgttgtagatagattaaggcgctgtggccggtaccaaagtcatccacggcgatctcaacgccctggcggtgcagccactcaaactcttccaaggcgttttgttcttccaccatgccgcgctcggtgatttcaaacaccacggtgaaatagtcggtcggcaacttagccagcagttcggtgatatcgtcatggaacgaaggcgcattaaggtgagaaggggcaagattgatgcccagcttggcgccccgtggcagagcttgcaccaattgcgggatatcggccacgatcctacggaacaggtggcgggtcaacgccacgatcaacccttcgctttcggcataggggataaacagatcgggtggaatgcgcccctcggtgggatgctgccagcgtatcaatgcctcaagaccggcgatggtgttggttgcggaatggaacactggttgatattcaacaaagatctcattgtgtttgatgcctctcatcagcgcgcgttcggggctttgacgcagtatctgcatatagtaatacagcgcgcccaccatcagggagagcaccaggctgcccaacacggtcaaacggatatcattagccgtcagggattgatggtagaagatcatactcagtggatagcccgggacggctagccggctggcttggcttttaggtaattgcgccagcggcatcatattagtgccgaaggtggttaccgcatgctcgccgatcacgatggcaaatccgggagtatctctatcgggtgaactgagcagcaggtagggcgccagggtgagatccagcgtggctaatatgccggtgttgcctggcccggggtggcgcagccacacggcaatcgccggttttcccggtaccatcggtgtgccttgctgtaatgccatatccagtggtttatgccagtcaatatcggaatagatatggctcattcccagcatcatgttaccggttgccgaagagcaataggcaaagccgtctttgaccagcacaaaggtgcgtacgccggtggtaaaagcggcacgataggtcaggtcggacttggcctgttcgcaggatttccccgtaagcggcatgatttgctgcatgatttcttgcagataatcgagataattaacggcatatttttgcgtacgggtttcgattttatgctgatattgcgtgcgctgatgatcgatcagaaataaagtgacagaggtaaaaacaaggaagaaaacgactgcgacaatacagcttttagtcaggctacgccgtgtgttggacgcatggcgtgcaaatgctcccttcaatcccattactcgccccctgagcgcagcataaaaatattcttgttatattattggtgattaatatatcccaccgatcctgcctgcgtcattattcgcttggcttgcgctaaggctgtctgtttagacacagcgtaaatagcgcgtgacgaaatggcatgtcacttgacgatgataggctattttttcaaccgttgcgtggtttctggcgcagtgataatcgaaaatagcgatgcgggtttgttcggcgccagcgttacagtgaaaaaaaacgctgccctggggcagcgttctcgtctcgtttgtttggttttcaggacttgattcagatactacgccgttagctggaacttttacccagtaaccggcggccttcacgataacgtttatcccaatagttatccgaaaggctggagattgtcacaccactgctggtagaggcatgaacgaatttgtcattacccagatagatgccgacgtggcggccagtagaaccggcacggaacagcactaaatcacctggacgcagtttggcgcgttggatttgcttgcccatatcttcttgctcataggttgagcggggcagatccataccaaactgttcgcggaaggtacgttgtacaaacgccgagcaatcaatgccgcgcttgctttcgccacctaaacgatagcggacgcctttccaatcagcatactggtccataatctttgacttgacgtcaacgttacgtaccatcgcttcgaattcatcctgagaggcttgcagtaaaagaccgtttttgtcattaactgcatgcatctcagtttgtgatctatctaacttcgaagtgtttgttgagctacaggcggagagcaccaaggctgccgcaattgcaggtaacacccgcaaaaaatatctcagaaaaggttgagatttgaccattgtaattgttttcccttgaagtccttaacgacgctagtcgttatctgaaaaataccaaacggaacgagactagttggcaccggcaggaaggacaatcagttagcatcggaaatgtgcaggaacgcacagttttcggatttttactaacgagccaagccaaaccaggcacaaacgcatccgagagtaccggaatgaagtgaggattgcgagcctttttccgacattctttatatgaaattgtgatgtaacataatgtaaatcttcatataaaaaaacgcggttcagcggttatgttggattggcgttaattaatggggtaggcatgttaacggtgtggttgttgagtaaacaagatgcgacaggtaaatcaccgagaggcgctggcctcccggctatcataatctaaagttatggctgcgttgggcgatacttaccaggtaatctgcagttcaaccagtggatcacaacatcgctggccggagtcatcagccaccaactggtaccgaccatcaccaccgacagcgaaccgacggcaatatcggtaaaccaatgtgcaccgatcatgatgcgtggcaggcagaagaccagggtgatcagcagcgcgatggcaaatgccgtgcggttaaagtagcgcagcataaagcaggagaaaatcaacagcatcatgccatgatcgccagggaagctgtcgctggaggcgtctttggttgggatgccggtgagttcgctgacccggttgatattgtcaaaggtcagggtggggctggcgtgttttaccggcagcaggtgaccaaactggttgagcaccactcccgttaacaacatcacgacgccggtaacgatcagacggcggcgtccaaaggcatcctgcttgaggtagaagaaaaggtacagtagccccatggcgatgagcgaaatgacgtcgaatattcgattgttggtgatcgccaccattctcagaaaccaggcatcgctggccagatgttggttgaagaagaaaaagattgctgagtcaatcttgaaccagaacccgtgatccttgggtaaataccaggaaagaaatagcacgatgcccaagacgttgagcatgaggatgaagggtaaattgcggcgtgtcatggctaacctgtaaaaaaatcaaaaaaataatgccaacgttaaaagcattaacttaaacggatattaaacaaggccgattgcaaagcattccagttggcctcgtcgctgtggatcaattcgatacggctgtcgagcggagcggtgggacgcgtctcgatactgagatcctgcccttggcggttgatcagcaaactgccttcggcaatgcgtacgaccgccttggcccgctcaaccggagctagcctgatccattccatcataccgacggtatcaaagacggtttccccatcgaaaatccagccgcagctggtgaatccttggccttggttgagggctcggcgccagcgggagttttcaggcaaacgcaacgccgctaatccttgggtcttggcgtggctatgatgatgctgtgcgtccggcaattctgtgcaattggtgcgtggccgatccaacagcttgatatccatgcgcccctgctcaatggaaaagaccggccgctgctgaccatgtaacgtttgccaggcttccagtgcctgagcatcttgcggctgccaggtatccattttattggcgatgatgacgtcggccgcagccagttgatcgcgaaaattttcattttcgctatagcgaggttcgccaagttggcggggatcaagcacacagatcgttgccagcaaatcgatccatccgccataggtttcctgagtcaacagcgccaggatctgcttggggtgacctaatccagtgggttcaatcagtaaccgatcgggtttggtctgttgcaacaacatattcaaccctacctgcataggtaacccgttaacgcagcacatgcagccaccggggatctctttcaataccgcaccgctgtcggccaacagggcgccatcgataccaatctcgccaaactcgttgaccagcacggcccagcgctcattttccggcttggtggccaacaggtgtcgaatggtggtggttttcccgctaccgagaaagcctgtgatcagattggtttttgtcatttggagatccccgttaatgatgttttcaattgattgaaagtgagcaattatttgcttttttatcgcgtttgcacataggcgtgccagatcacaaatataagcatgaaaaccgcctgtttttggcgttttttttctgctgaaatgttaggacttttcccataaaaaacgtggcattaacaaagttaattgtaccgtaccgtattgtttccacgaccttaatgcaccgattagccataaaaaaaaccacctatccttgcgattattcctaaataaataacctatctttaaagtggcttaacaaaagtgaggttgccatgaatagcttacggttaattatgatcgcaggagcgttgttttcatggatggcagcaagtcatgcgggttccacaggtggcgttatcaacttcgtgggtgccattgtcgaagggccttgtacagtagatgttagcaactcaacggcgaatacccaatgctatcgtaacgggcataactacacaggcacgcaaaggctggcaagttttgatgccagcagtaaagaacttccgctgaatatcggtaccaccgaaatgcggtgggtagaccagcagaaaaaactcgcaataatgacggtaatttatcgttaagtcctctgtcatgccgagtggggctcggcatgacatccccagaccccgtactttgtttcgttttcatacctttcattgcccaaccgactgaccaggattgcgtacggtaagccgtctgccaactggccgttactggatatcaaattaagacttttccgacttgaaatctgtattttgcggcaataaattatgcgccgccagagaggtggaaccccatctaactaaatgataaatagatgaaatctctctaacttgcgtttaatccaagaactttttttcaggtttatattggcttaataacaagtgaggtgcccatgaaaagcttacggttgtttttgatcgcaggaatgttgttttcatggctggcagcaggcgtggccaatgcagctaccggaggcgtgatccacttctatggtgccattgtcgaaggcccttgcacggtggaagtcgctgactcaacggcacaaacgcaatgctatcgcgacgggaaaaactacaccagcaaacaccagttagcgagcctggagagcggtagcaaagagttgccagagaatctcggcaagagcgaaatcaagtggttggatcagcaaaaaaaactcggaataatgacggtggaataccgttaatccacattcagtcaagtggccgtcatgcctggttgattggcatggcggccgatagagatcaattcaactgggtggttacccaatcttttaccgtctggcgcgctcctcgatcgcgcaatgacagataggcccgtgttacttccgccacaaacgcactatccgttggcaactgatcgccaaacacgcttttcaacgccagcaatgcagccacgcggggttcaccgtcctgtgaacaactgacggcctgctgcaacgtggccagcatcgggtcgcggatatcaatcggttgccctgcgtcatcaatcccaccgacataacgcatccagcccgcgacgccaagcgcgagccccgcatggctaccgccatattgccgatgccagcggatcgattccagcaggcgctgaggcaacttttgcgtgccatccatagcgatctgccaggtgcggtgttgcagtgccgggttgctgtaacgttcgatcaactgctcggcgtaggcggccagatcgatgccagcgacctgcagcgtcggagcctgctcgttcaacatcaaatggtgtgcggcgcggcgataattctcatctgccatgcagtcaacaatgtattggtaacccgccagataaccgaggtaggccaggaaagagtggctgccgttgagcatcctcagtttcatttgctcgaacggcagaacatcatccaccagttgtacaccggcatcctcccagcgtgggcggccagcgacaaaattatcttccaccacccattgaatgaagggttcacaggcaatagcgcattcatcacgcacgccacccaaagcggcggcgatttcatccaacgtttctggcgtagcggccggaacgatgcgatcgaccatggtgctggggaaggtgacgtgttgagcgatccactcggcgagttgtggatcgcgcgctttggccagcccggtcaccgcattgcgtaccacgtggccgttctctggaatgttgtcgcaggacaacacgctaaaggcgggtagatggcgctctcgacgccggcgtagtgcttccacgaggatccccggcaccgtggtgggttgggtcggattagccaaatcggctttgatcgcgtcgtgttgcagatccagttggccgctacccggttcgatgcagtagcctttctccgtaatggtcatggagacgatcgccacctgcggttcggccagcttttccagcacggcgtcgatgccttctaatttgcgatgtacgctttcgtgaacggctcccacaacgatggcctgatcgcccgccgcgcccttttctaacacggtgtaaaggtgatcctgatcgcgcagggtctggaatagcttatcgccgccgaacaggctgatctcgcagatcccccaatcgccgccgttacggttgagtaccctgtcggtcagcaatgcctggtgagcgcggtgaaaagccccaaaacccaggtgaacaattcggctgcgcaggctctggcgatcgtactggggcagttgtgtcttggcgggcaacggtgagttggcgatagttttcattaatggctccatgacgagagcaagggccggttgatcgcgggtataaagctatcagaccagttagccgcaggtgtatgcccggctctcgcgtatctgttaacaaccgccagtgtagggcggtagagaggtgaatgaaattggtcagtccaaaatatcccaggatcgtgagttggatcaatcaatcgacgtttctgttttgacagcacgccgctaatcagtaaggttaaagatgaatgatatctactgcaatgtggtataacaggattgatttgattttgcgatctacctcaccaccgataccgcttcaacgatgacagagcgacttttacaaggataaatcaatggaacaaacatggcgttggtatgggccgaacgatccggtttcgctggacgatgtgcgtcaggcaggtgcaaccggcgtagtgaccgcgttacaccatatccctaatggcgaagtgtggccggttgaacagatcaaggcgcggcaggctctgttggcggaaaaaggactggtgtggtcggtggtggaaagtatcccggtgcacgaggaaattaaaacccacagcggcaactaccaacgtcatatcgccaactatcaacaatcgctgcgcaacctggcggaatgtggcattgataccgtgtgctacaactttatgccgatcctcgactggacgcgtaccgatctggaatacccactgccggacggttccaaggccttacgctttgatcagatcgcctttgcggccttcgatttgcatatcctgtgccgccgtggggcagaaaaagattacaccgacgaagagcaggcccaggcccaaagctatttcaaggcgatgagtacggcagatattgccaagctgaccggtaacatcattgccgggttacctggggcggaagagggatacacgctcgatcagttccgtgcccggctggcggagtacgatcatatcaataaggcgcagttgcgcgaaaatatggccgtcttcctgcgcgctatcgtgccggtggcggaagaggtgggtgtcaggttggcagtgcatcccgatgatccaccgcgccccatcctcggcttgccacgtattgtttccactatcgaagatatgcagtggctgaaagagacggtagatagcatctataacggcttcaccatgtgtaccggttcttacggcgtgcgtgcggacaacgatctggtgcggatgattgaaacctttggcgatcgcattcactttacccacctgcgcgctacctgccgcgagcaaaaccctaaaaccttccatgaaggggcgcacttgcaaggggatgtggatatggttgcggtggttgaagctatcctggcagaagaacagcgccgtcataaagcgggcgatctgcggcctatcccaatgcgaccagaccatggtcaccagatgttggacgacctgaagaagaaaaccaatccgggctattcggccattggtcggttgaaaggtttggcggaggttcgtggggtcgagctggcgttaaagcggcggtttttcccggaattactctagtaaaagcagggcgcactcaggttgcgcccctaccgttgactagtctgcgcggctcatatagcggcgttctgcaatatgaatgcggattttatcaccgctgctcaggtactccggtaccagaatggtcaggccggtcgccatggtggccggtttgttacgcgcactggcagaggctcctttgatgcccggagcggtttcaacaatttccatatccacggtctgcggcagttccaacgccagcacctggccatccagcgtcagtacctgcatacccggcaagcccgcttcagggatgaacagcagctcatcttcgatctgatctttcttgaagatataaggggtgtagtcttcatcgtccatgaacacatactcttcgccgtcaatataggagaagtttaccttgcggcgagacaggctgatggtgtccagaatatcatcgcctttaaaacgctcttctaccttcagcccggtacggacgtcggagaagcgcattttatacagcgtgctggcaccacgggcgcttgggctctggacatcgatgtcctttaccagcagcagtttgccgttgtaattgatcgccataccgcgcttgatttcgttcgctcttgccattggaataccctgtcaacatagattttaggaagttgcgacaagttactcgcgccgtgcttttcaggcaagagccgcgcgcaaaaagagtggggaaaacgggcggccgtggccgcccctgaggcttatttgaacaccggcagcagatctaatagcgttagcacgtgggccacggcgttaatcgccccaaacaggatgatgaacaggatcatgccttggccgccgggagcacggtagctggcctgtgggaaacggcggcggctggcgcgtgccatcatggcaggaacgatcaccgcccaaatggtggcggccaggccagcaaagccgatggcgtaaaggaaaccgttcgggaacagtaacgcggccagggttggcggcacgaaggtcaccagtgccgatttggtgcggcctgcctggttatccttgaacttgaagaagtcggcgagaaaatcaaacagccccagcgacacccccaggaatgaactggccagcgccatataagagaaggcgttaagcagttggcctacggcatagctactggaaacgttacccatctgcttgagcaggctgccgatgttgcccccttcggcgatcacctgcttgaaggcatcacgggcgatattgccctggatcacatactgccacaggatatagatcgccagcgccagcaaggtgccgtataccaggctgcgcaccacggcaccgctgtctttttgataatacttcaccagaccaggtacgttgccgtggtagccgaacgaggtcagcaggtaaggcaatgccgcgagcgcatagggcaggtagttggcgtcgctgccgccctggttgaacaacacggcaggctgcacgtgggtgaacatatcaccgacggacaatacaaaggtgatcaccatgccgccgatcagaatggtgctaaggcgatccacggcgcgggtggataaccagacgataaaggccacgacgatggcaaacaccaatccagacagagtttggttggcgccgaagacgccttccagcgtatgggcgatgatcgaaccgcccgccgagatataggcataggtcagaatatagagtacgaaggtgatcgacaggctgttaagggtattccagcctttgccaagcagatctttgaccacggtgtggaagctggcgcccgccggataattcatggtggcttccagaatcatcagcccggagatcagcatacagaaccaggtataaatcagcagcgccacggagccgctgaaccacacgccagaagttacgatagggatagagaacatacctgcacctacggcggtgccggcaatgatcatcgcgccaccgaggacggaagggcgggaaagcttctggatggtgtccgcagacattattgctcctgattggccgttggccttgagttcttttgtactagctcaatggtacgtgcgcgatgtgtgcatgtaaagcggatatttggtgggattggtgcaatcttcagcgcttagggcgttattttggtggttttcccctcaccccagcccttatgtcttgatcttctccg

SEQ ID NO: 286 - DNA, 6194 bp, unknown
  Altogen  635822 strain
  misc_feature (114)..(160): n is a, c, g, or t
  misc_feature (201)..(306): n is a, c, g, or t
  misc_feature (6014)..(6138): n is a, c, g, or t
atgatggacgacagtgaagaggcgatcggtggcgtcttcaactatgcgacggccctgttcaacgggcaaacgatgcggaactacattgcgacctatcagcatatcctgcgccannnnnnnnnnnnnnnnnnnnnnnnnnnnnnnnnnnnnnnnnnnnnnnccagtacctggatacggcgcaatacgagcaaatcatctgcnnnnnnnnnnnnnnnnnnnnnnnnnnnnnnnnnnnnnnnnnnnnnnnnnnnnnnnnnnnnnnnnnnnnnnnnnnnnnnnnnnnnnnnnnnnnnnnnnnnnnnnnnntgagcctgacctatcggcagttgaatgaacgcgccaaccggttggccgcttacttgagagcgcagtttgttttacaaccggacgatctgatcgggctttgcctggaaagatcggagcgcatgatcgtgagtatcctggcggtgttgaaggccggagctgcctatgtaccgcttagccccgatatgcccgcggagagaatgctctggacgatagaaaatattcattcccgcgttattctgacggagttgggcgcgcaagaggcgctggccaagctgattgatccacagaagacggcgctgctgtgcgtggacgatcctgagttgatagcgcgggctgccagccaccaggtggttaacgtggcaacccaaaccaaacctgacaatctgatttatgtcatctataccagcgggacgacgggaactcctaaaggggtgatgattgagcatcattctgtcgccaatcttgtggaggctcagcggagtatctttggcactgagatctgccaggtcggagagccgacaaaaagttaccttttctattcaaactatacctttgacgcgcatgttctggatgtgttcagcccgttgctgaccggccattgcttacatgtcttgtctaaagagatacgtttgaatttcggtgcgcttgctgcctacattaaacaacatgccattgatatcggctttgtgccccctgcgctgctaaataacaatgaaacactggggctttccacgctaatcctgggaggggaggtggccagtagcagcgtgatggagcgctatagcgctcagggggtaaaagtagttaactgctatggcccaacggaaaccacggtctttgtcaccaggaatgtttaccaaacgggcgatagcaataccatcattggccggccgataggcaatgcttacgcttatattctggacggttgtctacggccgctccctgcgggtgccgtgggtgagctctatatcagtggtgactgtgtaggccgtggttatttaaataaccctgaggcgactcatcaggcgtttatcgtcaacccactgcaaagtgatgaagataaagcgcgaggacgtcacgatcggctgtataaaacaggcgatttagtccgttacctgaacgacggtaagattgactatattgggcgtaatgatgcccaggtgaagatccgtggcttcaggatcgaattggccgaaatcgaaagttgtctgacccaatatccacagattgaacaggtagtggtcctggcgctggagcatgactcggggcaaaagtacctggtggcctattatgttgcgccagacgcattgccagcagatgtgctgtctgagtatctgcaacagcgtttccctgcctatatgatccctacggcgtttgttcatttaacggcattgccgatgaacatgaacaataagttggatcgcaaagccttacctctgccgatattaacggatgaggcgaactacgtggccccagccaacgagagtgaaatgctgatctgccgcgtatttgcggaggtattacagcttaaggattatgcggtggggatcaccgatgatttcttccgcttgggcggggacagtatcagcagtatccaactggcgaataaactcaaaaagttatctggccaccatctcacggtgaaggacatctttgcccacagaacggccaaagcattgagcacttatctgctgcaacgtcagggtgacaatttgccggttatccagtcagaggcgggcatgctggcggatgagctacccttggcgccgatccagcgctggttcttccaggccgtcgaggcggggaaattgcctgatgttgggcattggaaccaggcatttatggttaaagtgccaacgttaaatgtcgagttactgcgtttgagcgtggctaaactggttgaataccatgacattttgcgtgccgtttacccgaaagatgccgctgtcggccactaccgtcaaacgatagcgacgttgccatttgatgcgatcaatcaacaggatttcacagccgttcagctcgatgcgcagttgacggcctggcagaaccgtttttgcctggcagaagggccactgttccatatcggttatattgcaggctacgctgatgagactgcgcgtatccatgtggcggtacaccatctcaatattgatgcggtcagctggcggattattaaccacgacttacgcacgctttaccagttctttgcagcacaaggcgataaccttgatgcaacggctgatgcgcaaactatcctgggccagaaaggcacgagttaccgccaatgggtcaactcgctgcaaaactacccagccgttgccgtgaacaaccatagggatgagaggcactactgggagaacctgaccacggatttggacgcctggcaccagcgtttggacgcccatcgtgtaggaacgctcaatcgtacgatgataagcctgtcgcaacagcaaaccggttgtctgttgcgagaccttcatcatgtttatcacaccgaggtgaacgacattctgctgaccgtactggcggatgcgttgtcgcaggtggttggcggtgacagtcagtatgtcctgctggaagggcatggcagagaggcgatgtttgacgatgtggatatcaacaataccgtcggttggtttacctgcatgtatccggtcaatctgcgtgttgagcatcgtgaccttgtacgcaatttaccgctgattaaagacaggctgcgaacccctcctcaccatggcttaggctatggcgtgttggttggctatgatgcgcaggcattgccggcagtgagcttcaactaccttggccagtttgatggtgatgaacgggatggcgagtgggcgtttgttcaggaatctacggggtcggcattatcagcgaataaccgcacaacggactttttagcgctgaacggcggtgtgctcaatggccaattacagttcctggtcgagggtgatctcagcccggagcagctcgaactgttcgccacgacttatcgccagcggttaatccagttgatcgatgagcttaagcggtcatctcgctcttatctcaccgagtctgatgttaatggcgtggtctccggtgaattgttagcgcacctccagcaggatgaagaggtggcggcgatttatccggctaacagcctgcaacaagggtttatttatcattacgtactgcaaggcgatgtcgacaacgcctatcgtacgcaaatggtctggcactatcgcaatgcgttggatgtcgagctgttaaagcgggcgtggcaatgcagccaggcgaaatatccggcgctgcggctaagattctcctggcaggaagagtttgtgcagattgtcgataagcaaggcacctttggttggcagtttatcgatatcagtgagcaggacgaacgtgcacgagcaagcaccgtggctgaactcatcaagcaggatcagcagacccatttcgatttgtctgctagcgggttattccggctgtatatcgttaagtgcgcggccgaacactacatttgtctgtttaataaccatcacgcgattctggacggctggagcctgccgatcttgctcaacgacgtgcaccaaaattatctggccctgcaacagggaagcgcgccggagcaaaccgcagatcaaagctatctggaggcacaggcattgctacagacggttagccaggaaaccgagcagttctggcaaaactatctgggtggcttggaggtgcaagagaatctcaccggcctgctaaagcctgagatgaagcacgtcaatttaagtgaatataaacacttacaagaccctcagagcgtgtcgaccgcattggccggtgagctttaccacgggctgaaggcgctctcgcggcagcatggcgtgacgttgaatgcgctgatgcagtattgctggcaccaacagctcagcctttatagccatgcggacgtgacgattgtgggcatgacggtgtctggccgtaacctgccggtggaggagatagaacgctctgttgggttatatatcaatacgttgcctgtcgttctggcacataccgatgaggcgatcatcgacaatgtcaaacgcctgcaggcccatattaatgacatcaatagctacagcaatatcagcctgatcacactgcaaaaggcgggggtacgtctgttcaactcgctattcgtgtttgaaaactatccggtgcctgccgataacggcgagagcctgttcaaactcgagtttgaggacagtgatgaaaaactggattacccgctgggcatcatggtgtatgaacaggatggacggattgagttcaagatcaactatgcgggcgagctgttcagccgttcggccattgaaggcgtgctgcagggaattcggctaaccgtacagcaactgatcgcggacccggccatggctccccaggcgttatcgctgctgacgaaggacgactatacgcagctggtagcaaaccagccgcgggttcaggttgccgtggagcgaaataaactggtcggtcagatgtttgaagcgcaggccgccagaacgccggatgctttggcgttggtatatcaggatactcggttgacgtatcgcgagttaaatcagcgggtgaaccagttggcggcttacctgcaggcgaactttgcgatacagcctgacagcgcgattgccctctattttgataagtcgacccatatggtcattgccatgctggccgtgctcaaggccggggcggcctatgtcccgattagccctcaggcaccgttggagcgcttgagtctgctggttgacgacgttaaaccggtgttgatcctgacgcagcagcattatgatgcacgcatcgctggctgtggtttccctctgctggatattgataacccgcaattggccaacaggctggcgcagctcgacgacagcaatgtaccgtcacgcacgcagccagacgatttggcttatatcatctttaccagcggaaccactggccggccaaaaggggtgatgattgaacatcactcgttaatcaacctggcgcaagggcagtcagacctgctaggtatgccttcgggctatgagcaggctgccaggctaaacacgttgtggtactcggaatatgttttcgatgcccatgcgctggatgttttctgtgccttgttgaatggccattgcctacatattctggcagaacaccaacgtctcgactttatcgcgctctctgcctatatcagggatcacgctatcgatttcgcctttattcctccggcgttactggcacaaaatgaacttctggaactgtccacgctggtcgttggtggggagtgtatcgatgcggcgatgattgaccgctactgtgaggccggagtccgtttgatcaacggttacgggcctagcgaaaccaccgtttgggcgacggcgcggatctatcaacctggtgatgccaataccaatatcggcaaggcgatcaacaacgtttgcgtctatctgctggatcgtcacctacgccccgtcccacaaggtgcgattggtgagttgtatatcggcggtgctggcgttggacgcggctatctgaataacccgcaggcgacagcggacgcgtttattgccaatccgttccgcagcgatgccgaacgcagccgtggtgaaaacgcccgcctttacaaaaccggggaccggggccgttacctgccggacggtaatatcgaatacctgggccgcaatgannnnnnnnnnnnnnnnnnnnnnnnnnnnnnnnnnnnnnnnnnnnnnnnnnnnnnnnnnnnnnnnnnnnnnnnnnnnnnnnnnnnnnnnnnnnnnnnnnnnnnnnnnnnnnnnnnnnnnnnnnnnncgcacaggcccccttggagcaagatgtgttgcgcgcccatctgcaacaggttctgc

SEQ ID NO: 287 - DNA, 3241 bp, unknown
  Altogen  635822 strain
  misc_feature (114)..(149): n is a, c, g, or t
tcctgcacgacccaccaattcttgatgaattggtaaagaattgcagccgagcctcctctcgttgctaacgcggttaagcagtaaaccacatcagtgggtcgttagctcagttgnnnnnnnnnnnnnnnnnnnnnnnnnnnnnnnnnnnntctcaaagaattctcagtaataaaatcccaacaacgaaatcgcatatcgtatcagtcgtgcgggtgagagcatgcgttcaggttcgagtctcgcttgcgagacaacggcggcagccggtcatcctgccagacccaccatcttaaaaattccaaagtactaaattccaaactccagcgcaccatattgcaccagtcgtgcgggtgagatcctgcgttcaggttcgagtctcgcttgcgagacaacggcggcagccgggcatcctgccaggcccactctcccacagaacactgctcctagccgttatcttttaatcccaaagcttctcatttcaaccaaaatttcagcccattaaacaaatctgcccatatcaagaaatgttcagcgacttttagctaaaaattaggtattttgtttagtatataaaacgaggtggttgagcaagcggcaggatacggcctaaaagcagacccacagcctagcatagagataacagcgatgagtgaaatgtttgatgtcaatgcggcgatatacccattcccgccgaaaccggtgccgctagacgtcgcagagaaggctttttatcgacagaagatcaaaaccttgctcaagcagcgtgatgcggtcctggtggctcattactataccgatcccgaaatccaggcgctggccgaagagacgggtggctgcgtcgccgattcactggagatggcacgtttcggtagccaacatcctgcgtcgacattgctggttgctggcgtgcgttttatgggagaaacggccaaaatccttagcccagaaaaacaggtgttgatgccaacgttgcatgccgagtgctctctggacctaggttgtcccgaagcggagtttgccgcattctgcgacagccatcctgatcggacagtggtggtttacgccaatacctcagcagccgtcaaagcgcgtgccgattgggtggtcacttccagcattgccgttgagctgattgaacatctcgatagcttgggagagaaaatcatctgggcaccggatcgccatctgggcaactatgtgcagaaacagaccggcgcagacgtgctgtgctggcaaggggcctgcatcgtccatgacgagtttaaaacccaggcgctgatacgtatgaaagccctatacccggaggccgcgatattggtgcatccagagtcacctcaggcgatcgtcgatcttgctgatgccgtcggttcgaccagccaactgatccaggccgcggtaaccttgcccaaccggcaactgatcgtggccaccgatcgcggtatcttctacaagatgcagcaagcttgtccggataaagaactgtttgaagcccctactgccggtgagggggccacctgtcgcagctgtgcccactgcccgtggatggcaatgaacggtctgaaggctattgccgaagggctggaacaagggggttcacagcatgagatttttgttgatggcgcattgcgtgaccaggcgcttattccgctcaaccgcatgctggattttgcagcgcagttgaaaatgcaggttaaaggcaatgcctgaatccaggctgacgttttaataaggaagacacatgagctttttcagcaccggcaacattctggtccacattccgattggtgcagggggttatgatctgtcgtggattgaggccatcggcacgttgtttggtttactctgtatctggtatgccagtaaagagaaaatcatcaactatctgtttggcctgatcaacgtcacgctgtttgcggtgatcttctttcagatccaactctacgccagcctgttgctacaactgtttttcttcgtggccaatatttatggctggtatgcctggagccgccagacgcaggataatcaggccgaattgcagatccgttggttaccgctgcctaaagcattggcatggggggcggtgtgcgtggttggtatcgcgttgatgacgtttaatatcgaccgggtatttgcctacctgacacagattgcggtggcggtcatgcaggggctgggtcttaacgtacagatgccagaactgcaaccggacgctttcccgttctgggattccgccatgatggtgctgtctatcgtcgccatgatcctgatgacgcgcaaatacgttgaaaactggctgctatgggtagtgattgatgtgatcagcgtggcgatctttgcttaccagggcgtctatgccatggcgctggaatacgtcatcttgacgctgattgctctcaatggctcttggctatggatacgcagtgccgcgaagaatcactcccagccgctttcttcagcaccttagtaccccaggggcgcaacaagcgcccctggatgttaatgatgatgccccagatgactggagtgtgagtggtcactcgcaatgccgcagtcaggggtatcacaatgctggtactccatctggatcgtcgcatggccaatctggtaatgctccagcaaataagcctggatgcgccgtaacagtccgtcatgatcgtggggtgggatcacctgggcgtgtagcgtcatcagcttttgttcaccaatctgccagacatgcacgtgatggatgttacgcacttccggaatattcaggcacagatccttttgcagcttattgatatctacctcctgcggtgttccctccagcagttcatggaaactttctttcagcaggcgccaggcgctgcgtaataccaggcaggaaaccaggaccgagagtatcggatcgatgggggtccagccggtagtgagaatgatgatggctgctgcgatcgcaccgactgagccgagcaggtcgccaagaacatgtagtgcggcggcacgcacgttgatatttttctcttcattgccacggtgcagcagccagaaggcgaacaggttagccagcagacccgctacggcgatcaccagcattggggtacccatcactggctgtggttcgaagaaacgccgtacggcctcccacaggatgaatacgacgatcagcagtaatgcggcagcattgataaaggcggccaacgtggtcaggcgcagatagccaaaagtatggcgggcgttgggttttcgctgtgagaagtgc

SEQ ID NO: 288 - DNA, 245 bp, unknown
  Altogen  635822 strain
ggcccactcctcggcatcgcgcagggtgtagttgaagatcatgcttatgcctgcccgataaccaacgccgcgttagcgccgccgaagccgaagctcagattcaagatgttctgtaaccgggccgggcggtgcccttcgctgacgtaatccagatcgcactccgggtcagcatttttcaggtgacaggtggctgggatcagctgatgctgcaacgcttgcaggcagatgatggattcaaagctgcc

SEQ ID NO: 289 - DNA, 351 bp, unknown
  Altogen  635822 strain
  misc_feature (115)..(159): n is a, c, g, or t
  misc_feature (226)..(304): n is a, c, g, or t
ggccagcaactcgatattttcaatcaggcaaccgaaggcgtaatcctcaaccacatagtcgatgttcatcgactcgtagttttccacgcggtcacgcttggcgttttcttccatnnnnnnnnnnnnnnnnnnnnnnnnnnnnnnnnnnnnnnnnnnnnngcgttagccgggaagaacggcacgcgcacggctggcaagttaccgatgcgcttttggctgacaatcnnnnnnnnnnnnnnnnnnnnnnnnnnnnnnnnnnnnnnnnnnnnnnnnnnnnnnnnnnnnnnnnnnnnnnnnnnnnnnntttgcggccacagatgaccaccaagtcaggtgactcttgatgccacg

SEQ ID NO: 290 - DNA, 433 bp, unknown
  Altogen  635822 strain
  misc_feature (115)..(247): n is a, c, g, or t
ggggcgttaagtgaggatgtccgccagcttgagcgtgcgctagtgagctgcgcgcagcaggtcgagaccgtgaaacactgtcaggaggaagtagatgctcaagccgaaaagcctnnnnnnnnnnnnnnnnnnnnnnnnnnnnnnnnnnnnnnnnnnnnnnnnnnnnnnnnnnnnnnnnnnnnnnnnnnnnnnnnnnnnnnnnnnnnnnnnnnnnnnnnnnnnnnnnnnnnnnnnnnnnnnnnnnnnntgaccttgatttgctgttggtgccggtgggggcatggctacgggaaaaccagcccgacatcatgaccactgacgagggcaaaaaacaggggtttacctacatcgccgacatcaacaataacgacagcctggatgtgagtatcagccttcgcctgactgagcggacgattgtcaaagaggttgaccg

SEQ ID NO: 291 - DNA, 988 bp, unknown
  Altogen  635822 strain
  misc_feature (243)..(313): n is a, c, g, or t
gccgaaatgctcaaccaaaaagcacccaccgtgcagagctggaaacagcgcgaaaaatgggatgcgattgcgccgatttcccgcgtcgaagccagcctggaagcgcggatcattcagcttattttgaagggtaagaaggaaggcagtgactacaaagagattgacctgctaggccgccagattgagcgcctcgcgcgggttaatcgctacatgaccactggcaacgaggtcgacctcaatccnnnnnnnnnnnnnnnnnnnnnnnnnnnnnnnnnnnnnnnnnnnnnnnnnnnnnnnnnnnnnnnnnnnnnnnagtattttttgatgattcattcgagtatcagctcggctggcacaaagccgggctggcgcaccgtatccgcaacatcctgtaatcgcgtcagattggcgcgacgttttattttgcccgcgagtcgctgctgcacgcgctgaaaaccggtcacaatcaggtattcctttcggccagtaaaacccaggcgtatgtgttccgtgaatacattattcagtttgctcacctggttgatgttgagttggccggtgatccgattatcctgggtaataacggtgcaaagctgattttccttggcactaactccaacaccgcacagagccataacggcgacctactggtcgacgaaatattttggatcccgaacttccaaaagctgcgcaaagtggcctccggcatggcctcacaaaaacacctgcggtcaacctacttctccaccccctccactctggggcatggcgcgtttcaattctggtcaggcgaactgttcaacaaaggccgtaaaaatgccagtgaacgcgtggagatcgatatcagccacagcgcgctcgctgcgggcaagcgttgcggtgatggtcaatggcggcagattgtcaccattgacgacgcacttgccgggggctgcaacctcttcgacctggacatgctgaaacaggaaaacagcgccgatgatttccg

SEQ ID NO: 292 - DNA, 217 bp, unknown
  Altogen  635822 strain
acctcgtcgctcagcagcaggcggcgggcatagccaccatgtttaagtgcgtgctgattgcctggctggaatggtgggtgattcgttacgcgcccgcgtctttcgggtttcgtatctggcggtgagtcgttcggccttggtgcgtacttttcatcatcgccagtcgtggcaggctttgacgtggtacgcaccgtttttttttgcgtaccgcttttgc

SEQ ID NO: 293 - DNA, 182 bp, unknown
  Altogen  635822 strain
atcgccgcattaaacccgcctgctgataggctttgtgcctcaaagttcatatttgaatctccccaatgcccggccagtgtgagttggacgccgaaacagtcctgtgtgtagccacgcggaaaacccacccaggtgagatagccttcgccccggttaaccacgccgccctggaaaataaagcc

SEQ ID NO: 294 - DNA, 285 bp, unknown
  Altogen  635822 strain
  misc_feature (117)..(135): n is a, c, g, or t
gttgatagcactggtgcctttctgattcacgagttggagcgacttgaccagacgctgaacttaccgctgacgtcccagacctggagccgtgatattgagctgcgcgaggacgtttcnnnnnnnnnnnnnnnnnnnttttgccgcggcaggtaccccgaatgcgaacggcaagaactggatcaatcagctttctaccgctatcgcagggctgaatgttgatatcgccaaaacgggcttcccgctggaactttgggggatggaactgggctggacgattgtagaact

SEQ ID NO: 295 - DNA, 232 bp, unknown
  Altogen  635822 strain
gaaacgtcctcgcgcagctcaatgtcacggctccatgtctgggacgtcagaggtaagttcagtgtctggtcaagacgttccagctcatgaactagaaaggcaccagtgctatcaactgttgcctggtcaaaggtcattggcattttttaatgctcccttaaatgttgtatgccagctcaatgttcccatcagcatcgcctgggccattgaaaactgcgttagtgacttgaac

SEQ ID NO: 296 - DNA, 13798 bp, unknown
  Altogen  635822 strain
caaaaagaagttagcttgaaaactgcctcctttcctccccggcctaaaggcccaggtttcccggaggcaatctgatgatgatgactgaatgactagctgtttcaccattaccattctggccgtcatcagccggacgtgttaatgccagcagggccgtaatttcatggttaacaaacaaagtaagggttaaagatggaaataagctggaaagcattgaagggctgcagcctcagcgcgcagcagttgcatgatattctggcgctgcgcatggcggtgtttgtcgtagagcagacgtgcccgtttcaggatattgatggacaggatctgcttaatagcacccttcacgttgccggatacagcgacggtaagcttgtcgcctacgcgagagtgctgcatgtgaatgattctccggatgcggccaaaatcacgcgagtgattgttgatgattccgtcaggggtcagaagttgggtgtcaggctgatggaaaaaacgatgtccttaacccacggttatgaaccgggcaaggcgataaagctctcagcacagtctcacctggtcaaattctatgaaggattcggtttcaaaacgttatccggcgaataccttgaggatggcataccccatcaggatatggagtatacagacacgtaatccaggctggtcttatccggcttcacattgattctttgataaatcgtgcgccagctgtaattagctttagccccaacccaccaagggtcagggcttgatagagtaaaccgcgcttattacgccgtgccgcccacggtcagtgaatccagcttcagcgtcggttggccaacccctaccggcaggctctgcccttctttaccgcacacgcccacgcccttatccagcgccaggtcgttgcccaccatcgaaatctgctgcatcgcctcaatgccggaaccgatcaacgtggcccccttcaccggtttggtaacgcggccattttcgatcagataggcttcagaggtggagaagacaaatttcccggaggtgatatcaacctgaccaccgccaaagtttggcgcatacaggccatactccacgctggcgataatatcttctggcgtcgacttgcccgccagcatgtaggtgttggtcatgcgaggcatcggcaggggtgcataagactcgcggcggccgttgccggtaggcgcaacgcccatcagccgtgcgttgagtttatcctgcatgtagcctttcagaatgccgttctcgatcagcacgttgtattgacccggcacgccttcgtcatcgatcgcaagcgatccacggcggccttgcaaggtgccatcatccaccacggtgcacagctcagaagccactaactgccccatctggccgctgaatactgaagtaccacggcggttgaagtcaccttccagcccgtgaccgacagcttcatgcagcaatacgcccggccaacccgcgcccagtaccacaggcatggtgcccgctggggcagccacggcagagaggttgaccagcgccatacgcaccgcttctttggcaaaagcatcggcacgtacttcaccatccaccacttccaggaagtagtcatagccaaaacggccaccgccaccgctggctccgcgctcacgcttgccattttcttccaccagcacactgacggagaaacgcaccagcgggcgaacatccgccgccaaggtgccatccgttgccgcaaccagaatctgttcatacacgccggtgatgctggccgtcacttcctgcacgcgcttgtcttctgcacgtgccactttatctacccgatgcaatagcgcgatcttctcttcccgcggcaggctttgcagcggatcgagcataggataaagcgcctgatagccgatctcacccagcgtatggactttgccattgccgctgtcacgcacgatgctgcgagcggccagtgcgctttggttgagggcgttcagggtgatttggtccgcataggcaaaaccggttttttcaccgctgaccgcgcgcacaccaacgccctggtcgatattgtacgagccatctttgatgatgccatcctcaatcacccaggattcgtggtagctggactgaaaatagaggtcggcgtaatcgaggcggcgttcggccagttgacccaatacggagaacaggtcttgatgactcagcttattcacagcgagtaactgctcactgacaaacgacaggctcataattttttcactctttattggaggagttttcaaccggcgcaatcagcgtcggctggaatcggttgtgctgcatcaccggcatctgcttgcgcaccgtatgcaacttgccggtattcacgcgcactttcagcgcggaaaccgcgtcggggttttctgccagcacattgccccagctgtctaccaccatggaatggccccaggtgcggcgggtagctccgtgacggccaacctgcgcaggagccaggatcacacactggttctcgatagcgcgggcacgcagcaaaatctcccagtgtgcctcaccggtaacgcgggtaaatgcggcgggcaccgagatcagctccgcccccttcgcgcgcagcgcctgatacaggccagggaagcgcaggtcgtagcatatcgtcatgcccaaacggccaaccggcgtatcaaccaccgtcaattgctggccatgctgataggtatctgactcgcgataatgagcgtggatatcattgatatctacgtcgaacatgtgcagtttgtcataacgaccacggatttctccctgatcgtcaaacagcaggctgctggtggtgatacgtgtcggatcttcgcggctgatcaatggcatagaccccaccagcaaccatcccccgtaggggggagccatatcgcgcaccgcctgctgcaacggcccgtgaccttccgtttccgcatgttcacggtaggcagccgagttggcaaacagtaaggcgttctccggagtcatcaccagcttgatcccgggattgagctgcttgatctgctgctcaatctgggccaggttgtcccgtatctgctcaccgctacacagctgtaataacgcaacgttagcatttttcatggcgatttatcctcttttggcttacgcaacacctcatgaatacttgggtggtccaggctgccggtaatgtcatagcggataaacgagatcttgctccacaacggccccagcactttcgaggccgcaaacaccgcagcccccacaatcgggttgatcacaaacgcggtcgccacgccgaccgtcgccgagatctctggcgctatcacggcctgcatatcaatctggcgcttcaccaggtcgatctggccactcatggcgatatccgccgccagcccatccaccaacaagttatctgtatgcattatgccatctttcgcccagatagtgccgcgtatggagtcaaagtaaaatccattaccaaaggtatcacggaagtcgaactgtaatttgcgcagcagggcatcaaagctgaccaggcgtaacaactgcccagcccggccaccgccgacgttgtcgatctcgcctttgcccagatcgaccttcatggtgccattgagcgtgttgatctgcggtttccatggttgcccatgccagtgcagatcaaaatcaatatcgtagggtgcgtcttttaatggaatgatcacaccgaagaagctggcggtgcgatcgattttgctgcccagcagtttaccttttaacgcactacgctcttcctgagcgttctgtttccacaggccggtggcgctcatacggccatagccggtatctaccagaccatggctgagcactaacgagtcgccctcgtgtttaacgtcggcttcaaccgtgccaaggttctgccccatcatccagcaggatttacagcgcaacatcagtgaaggccagccctggaaagagatccgctccttagagtccagcgggttggtagcgccagcactgccgtcgccgctagcaaactgcgggttgtagtaaagatagccaagatccgcgcgccacacgcccctatccggcatcgacaggctaccatcaatctctttacccttggcggtgacggtcgttcccgccaactgctgcaagaccgccagctgaaggttatgccacgcctgtccgcccagcgtcagttgcggggtttcgagcgttacgctggttgggaacacaaagttgcccaccttgcctgcgccactgctttgcttcatcgccggtgccaatagccccagccattgctcgccatccagtgcgggcagcttgagcaccagggatttatctttgggtaacgttggggtagaggaaccaccggtttgccaggcggcacgtgccagcattacctgttgtttagccagcagccattcgctgttgaagtggttttgcttacccgcactgccattgagcataaatccttgcaggccgccgttcacttttacgctaacgggtaacgcttcccctgcgggtttattcaggggagagggtaagtgactacttacttttttcagatcggcattcacaccaatctcatagctcggctcacctttatgcggcaggttgatcgccaccttaccctgccaggcggcgctgcctgccagctttttggcaaactctgtcggcaggccttcaaccttggccggttgccaatcgcctttcagcccaacgttaaccttataatcctgtttgccttccagcgtatcgaagttgaccgtcagcggctgcccaaaccagttggccgtcagggtatcgctctgcaggttgccgttgtcgaagcggaacttgccgctcactctctctagctggctctccagtggcttgaccagcagcgagttgttgttcagcgtcacttcaccactggcgttaaccagctcaccgtccaacggaatattcagatgtaagcgcccactaacattaccacctacctgcagctcatctaatgccgccccgacagaatcatcaagtggtgtctgcatgaaatagtcgtggatagcttgtccggtgcccgcaacgtcggcatcaatcaacaggcgttctttgcgatagtccggaatgatggcgctaatatttctccccgtcgcgtcacccagtttggtttgcggcgcgttcatccacaggccattgttggcaaagtcgaggtcgatcgccagatcgttcagcgctggccattccggctggaactggaaggtcgcgtggcgtagtgggacaaacacctgaaactgcccttcgttcttttcatacgggaagtgctgcggatcgcccgcataaatcagggaagcattatcaacctgcccaccctgaatcgcttcgctgaggtaatccaccaaatgtttacccatcagcggttcagggaaataacgccaggcatcggcggcatcatacaaacggatgccagccagaatatccagccaaggctcgccgttggccggttgctgatagcggaaatcaccgttaatccacaaggatttggcctgtacatccagactttgacttgccaattgccagccttgagcgttgttttgccaggtcaacgccccgctcgcacggccgatctccaacggtgcccggaacatatcgccataaggcagcgtgctgttgttcagccccagcgtcaggcggccattttccacgcccccggttaatgcaccagaaaaatgatcaacacccggcagcagtttccagtgttgccagctcagatcctgccaccacgcctgaaaacgggttttttccggctgttgcagagggatatccagcgccagcgccctgagcatgccgcgaggttgtaagtctttccagtgctccagcacttccgggctgaggaacgaaaaagtaggcagcaacgcttccaaccgttccaactggatgccggtggcgcgtatacggagttcttcactctgatttggcccgataaattgggtattttccggcaaccacagcgcagtaagggttcccggtgcccaggcttggccatcggttttcaggttcagggccggcacatgcacctgccagccgttgccctcacggctcagtgccagcgccaggttatcgacgtccagccggtgttgatcgctacccgccgaccaactggcggtacctttattaagcagggcattcccgctgtagattgcaccatttttgatattgagccaggcggccaggctgaaatcggcgctttccaggccggtattggtttgcagccagcggctgaaccagggcttcatgtcaatatcatcggcctgcatatagatggtgccggtattgagtaacccctgctcatcacgcagatccaggcgtagctggaccgcaccgtgctggccattcaggctggtcaggctgatttgaccttctgcgcggtggcggttttggctgttgagccaggtcatttgcgggatgtggaattcagcacgcgagcctgatggggtaaggaacgagaggcggctgttgcgcagatcaaagtgatccaattgatacaggaacagatcgctgaccccgttcggggtaaggccatttccattactgccttcacccccgagcgtcgtgttaagatcgagctgcagttgatagaaggtgagatcgcggaactgccagcgccaatgcagcagggattgccacacgtccagcgccagcgtgacgcgctcgatctggatcgtgctttttggcagggccaaacggatgttgcgggcttccagcgttgggccaaaggtttcccaactgccctggacatagtcggcttcgacgggcaccccggcgatcgcctgcaccttctccagcaattgcgggcgatagtggttaagctcaggcagcaccagacgcaacccgctgatcagcaacgccacaacaactatcaaaatggcgcctgtggctaacaggatcccgggcagtcgcctcacgcatttctccttaatgaccaaatatataacctaacgcttgtgcccctcaccctaaccctctcccacagggagaggggaccgaaagagttcgttatcagttgcagaaatttacctgaccatcacagattattaagccacatcaagaacaccatacttaaccacgacaccgtaccagctccctctccccgtgggagagggttggggtgaggggtattacatcatcacaacgtcaaactgttcctggctgtataacggttcgatctgcaccttgacctgtttgccaacgaagatttccacttccgccagcgcgtgtgactcttcacttttcaacgcttcacccactgccgcagaggcatagaccaggaaacgatcggaatcgtaagcatgatgcacgcgcacgatctcacgcataatctcataacagacagtttccaccgttttcaccgttccgcgcccttggcaggtcgggcagtcgttacacagcacatgctcaatactttcacgcgtgcgtttacgcgtcatctccactaagcctagctgagagaaaccattgatcgtggtttttacccgatctttactcagcgccagctctaacgagtgcaatacccggcggcggtgttcatcattgttcatatcgatgaaatcaatgatgatgatgccgcccaggttgcgcagccgcagctggcgggcaatggcctgcgtcgcttcgatgttggtattgaagatggtctcatcaagattgcggtggccgacaaaggccccggtgttgatatccacggtggtcatggcttcggtttgatcgatgatcaggtaaccgccggacttcaattcaaccttgcgctccagcgctcgctggatctcgttctcgacgtcatacagatcgaagatcggctggctgccggtatacagctccagcttattggtgatatccgggatgtactcaccggtaaattccaccagttggtcatgcgtcaggcgtgaatcgacgcggatacgatccagcgccgccccggcaaagtcgcgcaggatacggtgcgccaacgccagttcaccatacagtttgtacttggtctggttacgctttttacgctccatgaccttggtccacaagcgtttgaggaaagcggcatcctgcgccaactcttcttcaccgatcccttccgccgcggtgcggatgataaagccgcccagatcgtcgcaatatcccgccacggcgcgcttaagacgctcgcgttcggcttcactttcaatacgctgggaaacccccacgtgcgcagcgcccggcataaagaccaggtagcgcgaaggtagggtgatatcggtagtgaggcgtgcgcccttggtgccaagcggatctttcaccacctgaaccatcaggtcctgcccctggcgcaccagttcggcgatatcacgcacagagaaattcttttgttcatcaccggcaacacactcggtgtgcggcatgatatcggaggcgtgcaggaaggccgctttatccaggccaatatcgacaaaggccgcctgcatgccgggtaacacgcggctgacacgccctttgtagatattgcccacgatgccacgcttggcttcgcgctctatatggatctcttgcagaatgccgccgtcaatataggcaacccgcgtttccgacggcgtaatgtttaccagtagctcagctgtcatgctttctcctcagagccggtgtagcgcctgccccttatctttcctgcgctcacgctatggcggcgacgggaaatctagtggtggcatcaaccggttcttacctctcgtaatgcgacaaaatgactgagcagctcatgtgtttcgaccagcggcaaccccatcaccgcatgataacttccggttatcgttctgacgaaacaaccacccttgccttgaattccgtaagcgcccgctttatccatcggttcgcccgtggcgatatagtcgcagatatcctgtggtgacagattgcggaacgtcacgtcggtgaccaccaactggcataaaacgccctgtttatcggcgatcgccacggcggtcatcacctgatgctgcttcccggacaaggccgccagcatctgcgccgcatgctcttcatcccgcggtttttccaacacctggccgttcaacaccacgatcgtatctgcccccagcacgggccaatcctgttgcgccagggttacacccgctctggccttatcctgcgccagacggcgaacgtaattttccgccgcttccccttcctgtcgctgctcttcagtatgcgtcagaatgacttcgaacggtacgccgagcaaagtcagcagttcatgacgacggggagaaccggaagcaagatagagcgaaaacatcgttataacctcattgtacggcaaactgacggcggatcttgcgcatcagcaggaataaccacggccaaagcacgccgttgaccacactactccagaacacctcggggcggaaagaaacgttgatcactaaaaactccgcccagaacaccaccacgtccatagccaatgatagcagcacgacgatcagcgcttgctgccacagtgccatattgcggaataattggaatttgaacgcgacgagataggcgatgatgcccatggctagcgcacgcacgccgagcgtggaacccaggatcagatccatgatcagccccaggataaacccggtgccgacgttaacccggtgaggtagcgccatcacccagtaagtgaggataagcagcagccaggacggccggaacatgtagatttgctccggccacggcatgatttgcagcactaatgccaccaggaatgacagccagataatccagcgcccgttgctgcgatagcgattcatcgggttgtccccaccggtggcggctgaacggtaccggtagcaggagcgggcagcggagccggtgggcccatggcatcggccggtggcaatacctgcggcatcatctgcatcaggcgttcattggcaacgcggtgaacttcttccggcggcagcggcatagtgccgttgcgatcggcgccccacagtaacaacagatagcgcaggcgttgcagaccagcggttggccgcgcctggatcacggtataggcgcgttggttatccacttttaccgaggacacaacggctaccggatagccttccgggaagcgcccgcccaaaccggaggtgaccagcacatccccgacgcggatatcggtattgcccggtagatgttccagctgcaggtcatccgtacagccactgcctgcggcaatcacccggatatcattgcgcaatacctggatcggcaacgcatgggaagcatcacagatcagcaggacgcggctggtcattttagccaccgccaccacctgcccgaccacgcctttatcactgataaccggctggccttcatacaccccgttgtccgaccctttatcaatcacgacctgatcgctataggggtctgaaccggtggagatcacctgagtgaccattttgtgttcgtcctggcgcaacggcgagcctaacagctcacgcaaacgggcgttttcctgtttgaattggccaagaagaagattatcgctgtttttgagtaacagttcctgccgcagagcacggttttccagctctagctgttggcgggtagccagcgtttccgatacgctgtccaaaactttacgcggcccattagccaagaagtaaaaagggctgacggcggtgtccatgtagtttcgtattttaacgaacgtaccgagccggctgtcggcaacgatcagtgcaatcgccacgatcactgccaggaaaagtcgtagttgcagggaaggccccctgctaaaaatcggcttcataaattatgcacgttcctcgacaacagaaaggggaacgcaccagatgccaggttaataccgtcatccgctacgatccctccattctggggctgctcactattcttcgctgaacaaatcgccgccatgcatgtcgatcatttccaacgccttgccaccaccgcgagccacacaggtgagaggatcttcagccaccactaccgggataccggtctcttccatcagcaggcgatccaggttacgcagcaatgcgccaccaccggtcagcaccataccgcgttcggagatgtcggaagccagttccggcgggcactgttccagcgcaaccatgaccgcgctgacgataccggtcagaggttcctgcaaagcttcgagaatttcattggagttcatggtgaacccacgcggcacaccttcagccaggttacggccacgcacttcaatttcacgcacttcgtcatctggataggctgagccgataccgtgcttgatacgttctgcagtggcttcaccgatcagtgaaccgtagttacggcgcacataattaatgatggcttcgtcaaagcggtcgccgccgatacgcacagaagaagagtacaccacgccgttaagcgagatcaccgccacttcagtggtaccaccaccgatatcaaccaccatggagccggtggcttccgatactggcagacccgcaccgatcgccgcagccataggctcttcaatcaggaagacttcacgcgcgcctgcaccctgagcggactcacggatcgcacggcgttcaacctgggtagcaccaacaggtacgcaaaccagtacgcgcgggcttgggcgcataaagctgttgctatgaacctgcttgatgaaatgctgcagcattttttcggtgacaaagaagtcggcgatcacgccgtctttcattgggcgaatagccgcgatattgccaggcgtacgccccagcatctgcttggcgtcatgacctacggccgcaacgctcttgggtgaaccggcacgatcctggcgaatggcaaccaccgacggttcattcagtacaatgccttgtcctttaacataaatcagggtattggcggtacccaagtcgatggacaagtcattagaaaacatgccacgaaatttcttaaacataacgaaaggataatcctgcaagctgggggcggaaaataaaatccgcctactttaccaaccacacgaagcagcgacaaggcgcaaaaacgtcctacttcggtgaaaattagtctgcgttatttgtgaccgaatgcacggaaagcgaatggggcctgatatccctcaacaaaggctcagctagccaccaaatcaacgtaccaaacggcagtaacacagctcataaaatctaacatttttcctgattgtcaccggtggtaagcacctactgacgcccacaggaaaagacgggccattctacgttaatttttgcccggtcatcaggttaaacacgatatcgacgcgaatattttttgcgagctatatcgatcggctctggcgaagcgaaaaagtccccctgcccacctaggatcccgcgctctttcagcgtctgccattcgttgcgcgtacgcacgctggcggcaaaaaccttcgcttgagtgccttcgcaggcaccggtcaggctctgaacgaacagctggttctcatcccgccggtcaatactccgtaccaaccctgggtgaagcttgacgatctccaccggtaacgacttgatataagaggtactaaccaccgtcaacccggcctgagaaaccgccagacgacagcccaatccggtcagcaatcgcagcaccggacgcaaacggtcgatatgttgacacacatctgcctctgcaagttcaatcagaattcgcctgcggtgacttttttcacactgtaacagggtatcgcgcaactaacgttggaaactgcgctgcaataatgaatcaacgcatagtggaaacgccagcgtctcttccggccacagtgccaataaaggaataatccgattcatctgctggcggtcataactttccgccaagccaagttgattgaccagcggcatatactcggcaggcaacagttcctgtgcgccatcataaatccggctcatgatttcgcggtgatgcacatcaccttccaccgtcaccgccggcttttgatataaacgagggccgccacgcgccagcacctgttcaagcagcgtgcgccatttaacgctgccgcgccccttctctggcacatcgctatcataaacgtaccagccgttttcgccttgaagtacggcgtggcggggcgcccgttcggcgtaatcgatgatttcttccgtggtctgcccgctgcggtaggccacaataccaatatgcaagaacgcctcacggtcaatcagcgccgttgagggcaaggagtcgatcgcgttgaccagctgcgccgcgatgccgtccgcttctttcagcgtgcggtgtggcagcagaacggtaaaatcactgtggaagtaacgggccagtaaggcggcagggtaacgcatgataaaggtggacagcaggttgaccaacgaatacatcagctcctgcaccgctggattgccgtggatttcacgcagggtatcgaaatccggcaggcgcaccatcatgacgatgccgtgtgatccgacatcttccaactgagtagtgagctggttatcaaagaacagccggttattgaggccggttttggcatcctgagcggcaaaagcacggatcagggtatctacccggctacgctcctcacgtgcttcggccaaatcggccagcaagcgatccaacgcaccgctgacgctggcgggccattcgcgaacgtctcccttcagcacctgttcacgctcgccgttgagaatgcgccgcgctcggcgctccaggcgatcttcacctactgcctgttcacgcagccagcgtaaactgaacagcaggatcaccaccatgatgacaatcgacagcgtgaccgccgccgtggactgcaatgaacgcacgtcgctggcgaacggatcgaggtaggtgacattcacccgggtgccggggtgatgcatcatgttta

SEQ ID NO: 297 - DNA, 15128 bp, unknown
  Altogen  635822 strain
  misc_feature (241)..(304): n is a, c, g, or t
  misc_feature (701)..(771): n is a, c, g, or t
ggcatcttcataacctccccctgtcggggcttaagcccgatcgccgggtggtggaaatagaaaagccccgacggatgccagggcctagaaagtaaaaaacccgcactattggcggggttcttttgggtttttcgctgcggatataacttcgcgaagcatatacatatttaatcgatttccgcgtaaagtcaacgcttatatctgtcagcatcgaaattaaatgcatcgctcatcggcaggnnnnnnnnnnnnnnnnnnnnnnnnnnnnnnnnnnnnnnnnnnnnnnnnnnnnnnnnnnnnnnnnaaggtcggcggccatagccttcttgcttttccctttgccggtatagcgttcgtggatgacgtgcatcagccctgggtgcgccagcagcgtcttgccgattaccccgtctatcgtggccgcctcctggtcggtgcagaatgccaggctgcttttctgtttgccctccagcaggtctagcagatacgcgtgcatctccccttcttctaccccggccagcttgagctcccgcagcgccttggctattgcggttttggtcaccgcattgctggccaacagcatgttgaacatgttcccggcgttgccgaacttggccatgcccgaccaccggccccacatttttagcttgccctggatgaacacgcgttccagcgcgcgcaagtgcagctctttgccgtcnnnnnnnnnnnnnnnnnnnnnnnnnnnnnnnnnnnnnnnnnnnnnnnnnnnnnnnnnnnnnnnnnnnnnnngtggtaaagacgcagggtttcacggtcatattcggttttaatgcggccatcgatcgcatcgtggcagctgctgcaggaccacgcgccctgagcatcatcgggttttatgccagtgccgcaggtaccggccaggcggtaatgcgcaagcaccgtggtatagggattgaaattacatactccaggaatacggatctggcagtctcggccctctgccgctttggtgagcttgctcattgctgaccatcctgctggcggcgcagctgcatgaactcgctattctctggaatggtcagcaccagcccaaactgggcgcaccagccctcgacctgacacaggaaatggtgcatttcgccggtatctagatcggaggtatgccgcggctcccacgttgtggttttctcgccagtaacgaaatcgacgtattcgacttctaccgacccgagataggttttcttgaggttccgcttaacccattctggcgtggcatctgtacggccagaacggatcagatattcgctgatttcggcgtaccacatatgggaaagtgcgttttgggggatgctgcgtttttcgcgccatggcttgagcatgaggcgatacgcttggccaccttcaagcagcggcgcaagtatgtcgcctacggctttaaagttgccctggtgtaacttgataccctcggcggctatggtcatatagcaccgcctgcaggcagttttgaatgcaaaaaatcgctggcgtctgcaaacgtcagcgatagttcagatttgtttagttcctgcgccatggtgttcactccaagacgcagcaggtgatcagctgttcaggctgacgtgtgtagtgtagctcactttttacggacgtcgtagcccgcgcgtttgactaactcgatcattaacgacagatcggccatgacttgcccatcagtgagaactaacactgattgcgcttcgccacgatccatataaaccactgctctcccggtgaatggtaataacttcaaaaattgttccactgtaaacatattccacctcatcgatcgtttaactgatcgccaaaggatttactgtatataaacacagtatcagcagaaataagattgatcaaatgcttgctattaaaatactgatttaaatcacaattatctgatttataagaaactatcatccttgaaagtttctttttactaacctcaccacacaacaagacctggttgactttccgagatttaacttatctttgctttgtgattagcatctcattgcagcacggcatgctttgtagacgaactcttcatactgagcgattgcctcatcgtcagctgcaccgcaatcaaccaggttctctactatctcctttgtcagcttgccaaaatcgggcacccttggctgtggtggggcggcataaatagccccccaaggcgtagcatattcacccgatctgtctgctggtctctcaggcccgattgatatctgaacttgcccattgttctcacgcaaataaccgtagggctccaccttcatcgtttcgattttctgctctttctcttccagcgccactgtcgcctcacccagtatcgcaagcagctcgtcatgactattgagcaacgccattactgctggggtgtaactccaatactggctgcctgggccagtggccgcgccccgaagctctgcttttgcgtctgcaagtgtgattttaattttgctcattgctggcccctttaacgaagatgatccagtgggttttatccgccttgccagtctgctgcctgataattggcttctcatccgtcagaacgatgatttggctaacgggtatctgggtttcggcccatttgaatatcagaacgccgtgaggcctcaacacgcgaaaagcttcaacgaatccggcccgcaagtcatcacgccacgtcccccggtttaacttcccgtatttcttaccctgccagccgttcggacctacacgctcaagatgcggtggatcgaacacgacaacggaaaaagttccatcggcaaacggcagcatgcggaaatctgctagcaggtcaggactgattaccagccgccggccatcgcagagggtatgctcttctgccaggatatcgctgaaaacggtgcgtttgtcctgcttatcgaaccaaaacatgcgggagccgcagcacatgtcgagtattggtagcccgctcatgaaatcacctccatgtaggactctatgaacgccgttgccgcatcagagttgatcgcgtttccgtaggcgcgcagtcgtcccactctggagggagcgccattaaccagcgggaatgtgccgggtccaactggccgccactttccatctcggcagtggagccaatcagaatctcgccagtaaccgttaaccgggccgggccgcataattccgcctgcatccgcagatccgttacagtggcatgcgtccgctccatagacttcattttccgggcaatgtgcgcctctgccgttccccctggctggcttgccgtcggagttgcccatcctgaaatctgcgcaactacatccagacgatccgtgctcagtttcccgttgcgcatccggccgccctgatagccccccctgccatccgttgcagctggtgttggccaccccgttaatctggccgcccccccgatcgtcgttccccgttgtggggcattcgctgcagctgcttccccgcgtacctggttgttgtcgatggttgtcggcgtcggccagcctgacaaacccgctgcgtgagctaacatcacctgtcttttgtcctctgagttcatcctgttgttcacattctgcggatgatgctctgaatcctggtgtccaggtgtcggccacccggccagttgtgagaggccagccagtgtttgcaaaccgcgtctggtttctggctgaggatttgtattgcaggtcggcgtgggccacccaatacgcacggtcacggatgtgcggggcaccgatgcccgcagacggatacggtacaagcccgaaggtgtagcccattccttccaggtcagcctgtacaaggtcgaaccatgcatctgcgctcttgcttgcaacctgctcaccaaagatatgctcagggcgaagctcttggatgagccactggaaagatggccaaaggtgccgctcgtcatcaaacccagcgcctttgcctgcgtcgctgaaaggctggcacggacaggagccggtccagacggggcgatcgtcggaccatcctgcacggcggagagagtgactccagacgccgatcccggcgaaaaagtggcattgcttgtactgtcgaaggtcatcaggtttcacatcctcgatcgagcgttcatcgacatcgccgggcgcgatatggccagcggcgattaaattgcggagccattgagcggcgtaagggtcaatttcgttgtaatacgcagcaggaatcatgcccggccctcccgcaggtcgaatatcaggttttccaactcgtcagcaatcccgtctaaatgcggctgaactatcgattcttcatactgacgattttcagataaaccaccggggcaaatgttgtctcggcagtccgaaattacgcgcagcgccatctcgatcccacggactttagcttcgagtacctgagtatctgtagttggaatttcgtcggctgcaaagcaatcaaaaacgatgcataagacccatacgataacgatggcggtgatagcccagaccgctccgcccggctcttttatcagttcccaaaaatcagccattggcgttaccccgcacagcggccagcgcctgatcgaacattttgtgaagatggcagaaccgcagctcaactgagttgaagtgccacagccgtttatcgacaggggtgtactgagaatttgagcgatgattgatctctgctcgtaccataaatctttcgctggcatggatcagggtgtaacgcgcctgattaccctggcctacgacgacgatctcggcattcggtgatctgaccatattcctcagccgagttacgattgaggcgcgggttaagtcattgccggggtaagcctggtgcgccagcttgtaaatttcgctggtactcagttctttgcactggatcagatcgacaaactgcttggttgtaattctgaatttttggcttgttttattggtcattggtttatgtctcggttatttaacgattttactttttgcgtcggcgcgaattttcgccaacagttccatgccttttttcttgtaagccccatcggcgtcggcgatctgggattcgccaggcggccggtgctccagggacttggttttgcggatcggtgggatggaataacccatttcaacctgcttggcccacttcgccagctgacgcccggccagcgccgccaactcggcctgccctagttttcgctcaacgccagccctacgcagttctgtgcagatctggaacaacacggggtgtttccaggggaagctttccgacgattcatagcgccatgactcgttgcgccaccgcttgtattccgccatgacatcctcggttgtgagcccgaacgggttggccgtgcactcgccgacaatcgccgtgaactcagcaaggtctggtggccagtggttgcccgcgctgcagcgttccatgcaccgcttcgccgcgaatgccagttgttcattcgagaaccgcgaaatcgcttggacccaaatcatggagggcgccactccgttcttggtcacccagcggttggcataaatccccgccatcgtctcccaaaggagccagcccctgtctttcccgctctgcgtttcgtgcagccctgacctgctgctgagcggtaacgcctgctgttgctcttgtcgcatttgaacctcccgttgatgctggttttcttaccgccgcccgttgccgttcgtacagcacgtgatcggcaaatttctgttcccactgggtttgatttaatacccttccctcggcctgccagaacgaaataaaactggccagctcagtggcttcgtaccctggtgctgggcctgtgataatccggccccacagtgccgcctgccgttggaactgttccgacggtacccaagtaccagccatggcgaatttaccgaatgacgtttgcaggtcgtcgccccatggttccggttcctgtagttcccctggttttttatcagggggtaaatcatcagaattttgctggccccctagagagagggttttatcttttagatctacttcttcctctacttctggtaacgcatttggatctgctggtgtaacgccttgtgcgttaccttttgcgttaccactagcgttactaatgcgtttcacttgtctcgattttgtaacgcggttatttgtaagtgctcgttttttcgatgaattcccgttgtgcctgtcaaagttcgggaataccaacgtttcgccctcgttagccagccaaccgacatgaatcagtgcatccgaaaaaccggtaacgaaagtgatgcgatcaattgcatttttagtaacgctggtagcgttacactttgcgttaccgtcgatggtctgctgatcagcccaagcccagaggcgaaccaatttccctaacaccgcgtcaggatccagtttcaaaatttccgacaattggaacacctccggtttatctggagtgattacctctaccttgatccaacttgccgccataattgcctctactatcagtattctgtaacgctgggagcgttacgttttgcatacaaaaggattaccgttgtgcagaagccatggcgctgcttttggccggtttccccttcacacgcctgctatgcttcgcatgggttttcgcccatgccagcagttcaggcagtttcatgcgagggttgctgcgctggtgatcgacggcagccatggccgacgacactgcgacagcctcctcgtatttcgcctcacgcagctgcgcggcgatctgcttttgcaggaaatcatcatgtgtggtcattggtttatgtctcggtcagtgcagtgcgcaatatgcgcgccgtagttcgtggaagctccgttcggcctcgtcacactctcgttcgaaatcagccggtgatgcgttaagcaaagccgcggcgatcgcctcctggtgctctttcagcgaacggatggccaaatactcaatgctcttgcctgcaaccagtcgggcacgcagttcagccggtaatgcggccaggattgcaggctgcagcatttcgattttccgacgggcgccagcagtgtcgctgtccagccagcgaaagatctgctgcttgttgttgtgccaggcagcaaaatctacggtgccgacggcacgttcgatctggtccaggtgtggcagttccagattcatgtcgaaataagccctagtgatttcggctgctaccgtgcgctgagtggcctccgtggcccatccgcgcagcgcgtcgcggatcaactcgtgtttgatttccatatatcagtccttaaggggcgacgcaggtatcctgctgctgtggtaatccagaggttggattcgggtgaatgtcagggcgcagctcatgaggggttacaccggtaacttcatagattttcaaaagccgcccctcaggtgctcgaccggcatattttttaacccaacggttcagcgaagatggttttatacctatggcaagagccagctttctctggtttcctgcagcaactattgctctatcaagtccagtcatttttaactccatttgttagttaacaggaatcaaatatgagctaacagctaacacatgtcaacctgtggtgtaattgcgtatgttagccattagcttataattacggctatgaatacagatgaaatcaaagaaaacccaatagctgagcgccttgaagaactgatcaggactaaccatatttcgaaatcagatatggcaagaattgcaggtgttagcagatcatctgtaaacggctggttcaagagaggcactatcagtaaagagtcagcatcgaagctcgctgctgctactggggtgtcgcttgcttgggtgttaggcgaggaagacacaaaagaaaacggactaaccgaagaagaacaaagacttatagaactttaccgtcaattcccaagcgttgaacgtagcaatatggtggcggcgtttgaaatgcgcctacgagaaattaaagactattacgccagatacgctgatccagccgcacgaaaataaatacctctatgaaacaaaaagataccgcctacgggcggttttttattgcctatcacctgcgccattggttgacatgtattagccattagctcacaattcatttcaacaagcagcaggtgaaaacgttctgacagccggaaagacggcagagacataaccaatgaccactaccgcagggagtacaaaatggaaatcgctatcaacatgatcaatgcctccatccacacatcggccaacagcttcggccacgttgtcggtgagtttgaggaattggttgagcagctggcagcggcgggcttccctcaggcatctgagaaagtggattccattttcgaagagcttggcggcgcaaaccatatcgagatccgcgcttgctatatctccaagctaaagcaggttgtcgctgaactggagtccatgcctcctctgccggtcaaggcttacgaatgcacgaacccgctgttcgccgatgtcgatctgggctcagcaagcaatgtcctgatgtgccttgaaggtgagaagcaagcaacgcataagctggcaaaattgattgttgagcttttcagctccgctggctacgaggaagacggtaagaaaccgggcgataccgtgatgttcttcgttgtgggcaaggaaaggatcccggagttctacaacgctgttaattcactgcagtaataaccgagacataaaccaatgaataccatcgttcctaatagcggcaaagcggtaaccctccgcaataagcgcaccggcgcgccttgggttgcctcgttcgaccacacgcgcagcgtctaccggtttgaaccgacaggaaacctgcgcgccattaaggcaccgttcgaagcccccggcatcccggcggaattcgaacccgcgggcacccactgagggtataaaccatgaccattcggcgacatgtttggaaggacataatcatcagttgttctttgttctgggtgtttgtgttctttctaatttttgcactttctaattaaaaaataaccggcacctgacgggcaattactttgcccacgggatccccacgcctgaaaggcaccaaatcgcaattatttaacgaggtgttgatgtgaaaacttttaactcggaagtggcccggcaagcgcaggccaaatattgcaaagaaaagcaatatccacatttcgcgccacttgatggaatttgttatcgctgcaagcgggacatttatcagcaacaaaccgcatccgcgctccctactggcatttcagtgcaagaggcaggcagcaagctgatctgcttctgccctcactgcaaccggagctatgacgattagacgtaaaaaagcccgcgctaggcgggccatcttacccattttacatctgggggatgggtagccggggaaccacccccagcaaccgagacataaccaatgaccactatcgcagtcaatgatcgactgcattctacctaattctcaggagaattgcacaatgcaaaacgtgtatgcctattatctcaaggcaaaacagaaatccggcaaaccttcccttttcatttattttgaagcgaagaacgacgcccgggcgctgcgcgatctggaaaacaaaattgaagatgccgagctggatccaaaagagtatttcaagccggttcgcactgatttccctgttgttgatgacctgccaacagaaggtgagttctgtgataaatggtgcgaacgttattgcctgggtgacaacgggcaaacatgggagcaaatcgtaaccgaacccggccagcagctgtcacaggaagccgtgaaaccggcggctgttgaaccggccgcgccagtccctgcgcacgataaagatccacgcgaatacttctcaaaactgagtcacgccataaaggtgaccttcgtcgctatgcatgactttgtggctatcgacaccattttcaccaagtcagaaatggacaaggtaattgctgtcgctattcagcaagaggaccgatattacgcggacctgattaaggcattgacgatccccgcagtaatgacgatgaagtcagaacctctggccgcattcgttgccggtgtcgttcgtcgctatgagcatgacgatgcagactcaacattcgtcaatatccgcaagtacgtcgagcagctgcttgctgagccagcggatggccctgaaccgccaaaggttgcagaacccgaaaccaaaatcgtattcaagcgcggctatcaacagacctatgaactccttgatcgcgaaatcgcctccgctctgtgggtgggtgatgttgatttcgaaaatatcgcaggtgagatcgaccgctgggcgaagaaaaaaatcgaaaacaatgacgaagatttcaaacactggtcaatggcgctccgtgtcgttccaaacgttctgaaatacagccgcgagtctattttcggtgtagttcgcaatgcgccatcgactgacctataccacttccctggatcgctttcgacgtgggttaaagcctatcttgccgattatggcgtctacgagtttgggccggtacctgagcaagaggaacagaaaatcacagaggggctgcagcagccagaaattgaagatccgcagcctgaacctgaggtcgtcagcatggggggcggccaattcgacgtatccgcactctttgaggcttccccgcttaaagatgcatccacagaacctgcgccggaaatcgcctcaaatgagggcgaaaaagaagaagtggatgctattgaggatctcgaaccaacaacgcgcagcgcgtggctacgccgcgaaatcatgactgcccttgaaggtaaaacgtcagtgatgagtgtggccgatgttaaggaacttatcgcaaaaattggcgaccttaaccacgcatatatcgccagactgttggccaaagagatagagccttgcgatcctttcaagcagttggccaaggacgatatttatcacctcacctgcgatgtgcttgagggctggatccatgaaaaagacgagcggattaatctgctcaatgaacgcattgaatcttacctgcgcgacggcagcgcagggcctcaaagtgtcacccacgaaaacaaagaagttgcggaggtatccactccagtgagcgaaaccgctccagaggtgatcgccagcgaagaggtagaacctgccgtaatttacccggcctatttcgagcctggtcggtaccacgatatcccgaacgacgtttaccacgcggcgaacggcatcagtagcacccaagtgaaggatgcacggatcagcctgatgtacttccatggccgccacgtcatcaagtctattcagcgtgaacgcaccgacgccctgacattcggctcgctggtccatacgctggcactcgagccggataaactggacgcagagtttagcgtcgaaccgctgatccccgaaggtgcattcactgatacagcatcaatgcgcgcgtttatcgacaagcacaactcagcgctgccaaaacaggccgacgctgacacgcttcgatcgataatcgaaaaacacaacgccacactgccggtaccgtatgccctgggtggtaatgccgacgaaataggacagttctataccctgctgccagccgaatttcagcggatcggcgaggaacagaagcctacagcatcagcgatgaaagcctgcatcaaagaatttaatgccacgctaccggtacctttaaaaacgtcgggatcacgcgacgctttactcgagcaattggaaagcatcgacccggagtttgtcgaagaagagcgcgcgatcccagcccctctgtctgtgagtggtagcaaagaggaaatggctgcgcgcattaaaacgattttgccaactgccatattcgccgacgaactgatcagtgcctggaaaagtaacagcgatcagcgccagccgatcacccaggcgcagatgaagcacgcgaaagcgattcagtatgccctcttatctcaccccctggccgggctatggctgcaacatccgcaacgtgcgacagaggtgagttacttcggtattgatgaaaatacagggctcgacgtgcgcatacgccccgatctggaagttgacactggcgcgcggcggattgccatcgacctgaaaaccgtcagcctgccgtacgttaagcaggataacctccgtcatcgcctacaccgcgaaatcattgagcgcgattatcacatgagcgctggcatgtattgcgacgttgggatgttcgatcagttcttctggatcttcgtcaacaaagaaccaggttatcactggatagccgtcatcgaagcctccgccgatgaactggccttgggatgcgccatttacaaacagcagttggtggcaatccgcaacgcaatggataccggtatctggccggagccaattaccgaggtgtttactgacaccctgaccgattacgaactttcacgcctgaaagagctgaacggagagccatcatgagcactgaaattatcgaacagaagaaaaacggcatcatcgacaacatatcaatcctgactaacggcgatctgtttgatcgcctgatgaaaatctccgaagtgatggcgaagagtggcgctatggtacctcaacattttcgcgatcaacccgatgcctgtatggcgatcacaatgcaggccgcgcgttggggcatggaccccttcgtcgttgctcaaaagacccatctagttaacggcacgctgggctatgaggcccagttggtaaacgccattatcaacagcatggcaccaactaaagatcgcattcactttgaatggttcgggccgtgggaaaatatccttggctgttttgtcgagaagacaggcaagagcggaaataaatacattgcccctggctggtctctggcggatgaaaaaggcgttggtgtccgtgcctgggctacgttaaagggcgaagacgagccgcgcgagttgctgctttatttgtctcaggctcaggttcgtaactcaaccttgtgggctagcgacccccgtcaacagttggcatatttggccattaaacgttgggcgcgtctgtattgcccggatgtgatactgggtatctattctgacgacgaactgcttgagccaactccacgcaccgagaaggatatcaccccggcggcagcgactgtttcagaactggcaagcgcgccagcagccgaactggatgaaagtaaggcaacggaactggctgacgcccttagcgccgcgctagatgaggcaagcactcaggaggaagcaaccgccattgagcagcggatagccaagcacaaagacgcgctaggcagctctctgctattcagtcttcgtggtaaagcccagaagaagcgtagcggctttaaggcggtgatagagattgatgctgcattcagcgccttggacggcaccgatagccagaaattccagcaattggaaacgctggtagcgaaccggaaaaacaccttgccgccagtagactatgaacgcttcaccgtggcactgaacgacctgcgaccggagtaccagcaatgatcgacatcctgatcggtttcgtcctgctggtcagtccatgcagtcacgatgcatgcgacgcgataccggtatccgaacgggtgtactcaagcaaaactgaatgcgagcaggtgagagaagccattcagttacgccggccacaagccgtcttgttttgcggcgatgtctatcgatctgaaaactgatttccaaaaaccaaaccacaactggccatcacgattaccatggtggccggttgtgtgctcgaggcataaccatgaccaagttactgacattagaagaatgggctgatgaaatttatacggacaaggctaaacctactgtgccaacgctgcagaggtgggcaaggaacgggaacatatacccggcgcctgataagcaaggcaggcaatacttcgttaagcctggcgcaatctatatcaacccaaacgacctaaatctcggaaagaaaataagagacgcccaaagcgcggagcccgcacgggccgcgtttatggagaaggtaatcaatggcacggcgaaaggacgggtatgatatgaaactacccaaaaatttaacttatcgccaaaagtacaaatctttctattggcgcaatcctgcaacaaaaaaagaaataccactgggccaaattgcgcgcagggatgcgatttcgcaggcaatcgatgccaacaattaccttgatcagaactattcccccacccccttgcttgagaagataaaaggggcgcacgaatacacgctgaatgcgtggcttgatcgctatgacgtcatttttaaacgccgcaagctatccgagaacacttacaaatctcgcaaaggacaaatagccattgtcagcgagaaaatgggggcaatggtgttatcgaaaatcacgacacgccacgtcgctgagtttctcgaattctgggtagttcagggcaagcagactatggccacaaccatgcgatccgtgctgtctgacattttccgcgaggcaattgttgaaggccatatcgatagcaacccagtgacaccaacgcgagcagccacagttactgtgaagcgagagcgcctagagctggagcaatacatggcaatccgtgaagcagctgccacacttcccacctggtttggccttgcaatggatctcgcgctgatcaccggacagcgtcgggaggatgtggcgctaatccgtttcgaacatattgttgatggtcgcctgcagatcacccagggaaaaactggcgccatgatctctgtacctctggatttggagctgttcgcactggggctaaaactggaagcggttattgaacgatgcaggcaggccagcaccacaggctttatggtcagttcagggataaggaaaaacagcctggacggctcccttaatcctgacagcttaacaaaaacatttgtgaaggccaggaaactggctgggctcgttcttgaggattcgccgccaacgttccatgagatccgaagcttggccgggcgactgtatgagaaggagaaagggaaggagtttgcgatgaaattgctggggcataagtcggtcaaaatgacggacaaatatctcgatacgagggggaaagaatacgtgatgctgtaaaaggccgagtacaggaattcgtggaaatttcgtgtattttcgtggaattgattttttatccttataaatcaatgacataaaaaaagaccgagtacgatt

SEQ ID NO: 298 - DNA, 79902 bp, unknown
  Altogen  635822 strain
  misc_feature (37073)..(37073): n is a, c, g, or t
ggcgcacgaatgccagcgccatctgtgaaggatccagcccgtgctttttcgccagcgccacgtattcggcgatcgccgcctggctctgggctgaagagtagcgggtaaagcggctgaacagggtgttgcgtgccccggctggtttggcaccgttgaggtatttacccgacagcgtaccgaaggccaggctggaataggctaacagttcgatgccttcatgttggctaatctctgccaaaccaatctcaaagctgcggtttaacaggctgtaggggttctggatcgacacgatacgcggtagttcgtgtttttctgccagttgcagatagcgcatcacgccccaaggggtttcgttagagacgccgatatagcgaattttgccggcacggacctgctcggttagcgcttccagggtttccagcagcgggatggtggccttctcatcggtgtactgataattgagcttgccgaaacagttggtggtgcgctgtggccagtgtagctggtacagatccagataatcggtatttaaccgtttcaggctggcgtccagggcggcgcggatatttttgcgatccaacgcctgctgtgggcgaatgcccgcgtcattaccccgaattggcccggagaccttgcttgccaacacgattttatcgcggttaccgcgcgccttgatccaactgccaatgtactgctctgtcagcccttgggtttccgggcgcggcggcacaggatacatctctgcggtatcaatcagattgatgccagcggctaatgcataatccagctgtgtgtgggcatcggcttcgctgttttgttcgccaaaggtcatggtgcccagtcccagcacgctcacttctaaagaactgtggggaatacggtggtattgcattaacggccttccttcaatgttagcgcttacgggcgtgatgcccggtaaaacagaagccagagatccaacggcgtaacacgccttacttgactataaccaagcgtggcagatggtggaagaggattatacccgccgtctttcaagctgcagtttgaaatccatagggtatttaactgacgggctaaacccctgattgataatccgtcaggggtcaggatgatacgggggctgggattaacgttcgataacctgcgagacctgatcgccgttaatctggcgctggttgccttgctcgtcctgatagctgatcaggccggtatccttatcgattttaggcttaccctgcgtgaggatcatattgccgtctttggtggccatcacatagtcgctggaacagcctgctaatccggcgaccatcatcagggcggaaatagccattacccactttttcatgccgaataccttatatacagagaataatagtcttaatagggtagcaaactctgccaaagatggctttcggacgtatcccatctgtgtaaggaaaaatgacagtgaaatcagagggcggagggctaatcaaagcgtaaagtgcctggcgagcagcgcccgggtgaagtttttcttcagataaaagccgcgcggcaaggtcaggattggttggccctgttcgccggtggcttcggtcagtaccttgttgttggccgcttttggccgcagctgtagcacttcaccatggcgggcggtgatccgttcaacctggccgagtacgataagatccatcagttcctcccaatcccggcgcagcatctcggtttcttcctgattgggctgccacagcagcgggcaacctacgcggcgctgtgccaacgggatttgtcgttcgccctccactgggatccatagtacgcgtgccagtttgtggcgtacgtggctactttcccaagtgacgccgctattgcctgtcagtggggctacgcagacgaaagtggtttccagtgggttaccggcggcgtcgaccgggatggttttcaactcaatgcccagctctgggaaatcctgttcaggtttactgcccgccatggcccccagatatagctccagcagcatgccgacccaacctttatcccgtttgagatccttggggatgctgacctgcgcacgagctgccagttcgccaaggttaaagccagccagcgcctgagcacgggctaataattgctgttcgttttctggtggcagaggggataaacacgccataaatcagacctatgcattgtggttaaaaaacgtaccgaatttactcacagccttaaaagggaaaagctggctggggaaaacaacaatagtagcatgattttgcatgactttttggctacccaatcgcggtagaaaattttcagtgcggggttgtgcacctgtagccaccgacaataaacaggatcttacacctatttatccacagatttctgggataacccaactttttaccgatcactggtttgatttacagccttgacgcggggcattttttacgaatttggcggttttataggtcaccgggtataataatctgtggataaaatccgcattggtggatctttcaccagagaaagatccaaagcgtgcatagatcacatttttaccctgttcataactgcttttgagtcattaattcattgtatttaaaagaataattaaaaattgaaaatacggcatattttaagttcaatcgagttttcccggcttatccctagagttcttcacacacctatccacagaaaaagtgaataaaaccgccctcgaacctcgttacatgtttataactttgccattatctgtgagttatcccaatgttattcgagcgacggcgttgcaaagcagtggtttaccgcctgtggcttgtgtgaaacaatcaggttatcaatacgaatttatgcttatcgaggtagtccggtgatcgatgatgatggctaccgcccgaatgttggtatcgtaatctgtaatcgtcgggggcaggtcctatgggcccgccgttacggtcagcactcctggcagtttccccaagggggaataaaccctggcgaaacgcctgagcaggcgatgtaccgtgagctgttcgaagaagtggggctgagtaaaaaggatgtgcgtatcctggcctctacccgcaactggttgcgctataaattgccaaaacgtttggtgcgttgggacacaaagccggtttgtatcggccaaaagcagaaatggtttctgctgcagttaatgtgcaatgacgcggatatcaacatgcagcgcagcagtacgcctgagtttgacggctggcgctgggtgagtttctggtatccggtgcgccaggtggtgtcgtttaaacgcgacgtgtaccgccgggttatgaaagagtttgccgcaaccgtcatgccaatgcaggaactggcagcacagcggcagcctcctgcttatcgccgaaagagaggttaagtcaaaccgactatgctcacgcgcttgcgagaaattgttgagaaagtggccgcggcggccagtctgacagatgcgctggatcttttggtcaatgaaacctgtctggcgatggacaccgaagtctgctccatctatctggcagacaacgaccgccgctgttattacctgatggcgacgcgcgggttgaaaaagccccgtggacgcactattgccctggcctttgacgaaggcatcgtcggcctggtcgggcggcgggcggagccgatcaacctggcggatgcccaaagccatcccagcttcaaatatattccgcaggtcaaagaggatcgtttccgatccttccttggcgtgccgatcattcatcgccgccagctgcttggcgtgttggtggtgcagcaacgtgaactgcgccagtttgacgaaagcgaagaatccttcatggttaccttggccacccaaatggccgggatcctctcgttatcacagctaaacgccatttttggccagtatcgccagacccgaattcgggcgctggctgcggctcctggcgtggcggtggcggagggctggttagatagtagccagccttcactcgatcaggtgtataaagcctccacgctggataccgtcagcgagcgcgaacgcctgacacaggcgttggaagaggctggggcagagtttcgccgcttcagtaagcgttttagcgccagctcgcaaaaagagagcgcggcgatcttcgatctctattcccacctgctcaacgatgctcgcctcaaacgtgaactgtacgcggagatcgatgccggttcggtggccgaatgggcggtaaaacaagtgattgaagccttcgcagcccagtttgcgaccttgcaagatacctatatgcgcgagcgtgccagcgatctgcgcgcgcttggccaacgcctgctattccacctcgacgataccacccaaggggccagccaatggccagcccgttttgtgctggtcgccgatgagctgacggcgaccctattggccgaagtaccgcaggatcgcctggctggcgtggtagtgcgggacggtgctgccaactcccatgccgcgatcctggtgcgggccatgggtgtgccaacggtgatgggggcagacatccagcctgcgctgttggcccagcgaatgctgattgttgatggctatcgcggcgagctgctggtcgatccggaaccggtgctggtgaaggaatatcaacgtctgatcagcgaagagcaggagctcagcaagctggcagaagacgacgttgaacagcccgcagagctgaaaagcggtgagcggatccaggtgatgctgaacgctggccttagcccggaacatgaacaactgctgggtgcgcgcgtggatggcgttggcctgtaccgtaccgagatcccgttcatgctgcaaagcggcttcccgtcggaagaggagcaggtggcgcaatatcagggcatgctgcaactcttctatccgcataagccggtaacgctgcgtacgctggatatcggtgctgataaacaactgccctacatgccgatcagcgaggaaaacccgtgccttggttggcgggggatccgcattacgctggatcagccagaaatcttcctgatccaggtgcgtgccatgctgcgtgccaatgcgggaaccggcaatctggggatcctgttgccaatgatcaccagcctggaagagatcgacgaggccaaacgcctgatcgatcgcgccgggcgagaagtggaagagatgctgggatacgatatccccaaaccgcggatcggcgtaatgctggaagtgccgtcgatgatcttcctgatcccttatctggccgctcgcgtcgattttatctcggtgggaaccaacgatttaactcagtacctgctggcggtggatcgtaataacacccgcgttgcctcgctgtatgacagcctgcatccagccatgctgcaggtactgaaattgatcatcgagcaggggacggcggccggtctgcaggtcagcctgtgcggtgaactggcgggcgacccgatgggcgctctgctgctggtgggaatgggttaccgcaatctgagcatgaacgggcgcagcgtcgcacgaatcaaatatctgttgcgccatatcgaactggaagacgctcaagggctggcccagcgggtattgagcgcccagatgaccaccgaggttcgtcaccaggtagcggcgtttatggaacggcgcggcatgggggggctgatccgcggcggccgttgattgggcgttgcccagcccgttaagcgtagacctatttttttacagaacttttcccggtcggtgagcccggacgtggttaagcctatgttatgatgcgccatctcaatgcggtgctcccgttgcacgggttttgcaccgcgtttggcacctgccgcccccgtttggggatgaataacagacatattgtggtgatagatgagcactagctatctggcgtttccaaaatttgatccggtgattttctctatcggcccggtctctttgcactggtatggtttgatgtacctggttggctttgtttttgccatgtggttggcggtacgccgcgcgaacaagcccggtagcggttggaccaaagacgaagtggaaaacatgctgtatgccggtttccttggggtctttatcggtggccgtgtcggttatgtattgttctacaacctgccgctgttcctggataacccgctctacctgttcaaagtctgggatggcggtatgtcattccacggcggcctgattggcgtgatcgcggtgatgttgtggtttgcccgtcgtaccaagcgcaacttcttccaggtctctgattttattgccccactgatcccgtttggtcttggcgctggccgcctgggcaactttatcaacggtgagctgtgggggcgtgtcactaccgatacaccttgggcgatgctgttcccaagctcgcgtacggaagatatcgccatcgctgccgccaatcctcaactgctgccgctgctcaatgaatatggcgtgttgccacgtcatccgtcgcagctgtatgaaatggtgctggaaggcatcgtgctgtttatcattctgaacctgttcatccgcaaaccacgtccgatgggggccgtttcgggcctgttcctgattggctatggcacattccgcattatcgtcgaagcgttccgccagccggatgcccagcttggcctgtttgacggggtgatcagcatggggcaaatcctgtccgtgccgatggtgctcgccggtattattatgatgatctgggcgtatcgtcgtcgtccacagcaacaacagtcgtgaggaaaaatgaaacagtatctggatttgatgaacaaagtgctcgccgagggcacccctaaagccgaccgtaccggcactggcacgttgtcgattttcggccaccagatgcgtttcaacctgcaggaaggcttcccgttggtgaccaccaagaaatgccacctgcggtcgatcattcatgagctgctgtggttcctgaacggcgataccaacgtggcgtatctgcgcgaaaacaacgtcagtatctgggacgaatgggccgatgaaaacggcgaccttggcccggtctatggcaagcaatggcgtgcctggggggcggcggatggtcgccagattgaccagctaagcaccgtgttgcaacagctgaaacaggacccggactcgcgccgtattatcgtttctgcctggaacgtgggtgagctggataagatggctctggcaccgtgccatgccttcttccagttctatgtggcggacggcaaactctcttgccagctgtatcagcgctcgtgcgacgtgttcctgggcctgccgttcaacattgccagctatgcgttgctagtccatatgatggcgcaacagtgcgatctggaagtgggcgatttcgtctggaccggtggtgacacccatctgtatagcaaccacatggagcagacgcagctgcaattaacccgcgaaccgcgtgcgttgcctaagctggtgatcaaacgcaagccagcttcgctgtttgattaccgctttgaagattttgagattgaaggctacgatccgcacccgccgatcaaggctcctgtcgctatctgatttgctgagggccgtatccggccctctttcttcatcccgctgaaagttggcgcgccacatgctgcgcccgtgctgcattgccaaaaatgcgaagccgtactcaatttcccccagcttgttacctgctaactaaaaattctgcgcatcatttgccagcctgagaaaaggtgcctttcatcgtgcctctggccgattacactcgccgtatgaaccgatataaaaatagccccgaacaccagcaaggcctgacgctgatcgaactgatgatcgtgatggtcctggcggggatgctgacctcttggggggttagccagtggcatcactatcaacaggcgctgcggttggagcagactgcccagcaactgctggcatttttaacgcgcttacaggccgatgccaactggcataaccgcaacgctttattgtggtttcggccaggcaaaatctggtgcataggcagcggcccgcaggtggcatcctgtactgcactggcggatcgggcctttaccccagaacacctggatgtggagctacaaggttatacccaaaaggagatgggattttatggggtgcgcaacaatgcccaggccgggcatattctgctaggcaatcatgctggccgcatacgtctggtgctctccgccaaagggcgactgcgtctgtgcagcgaagaaaccgccatccggagcctgcccttatgcgaaccttagaaccaggctttaccctgccggaggtgctgctggcgatgactttcggcagcctgatagcattggcggctgcgaaaaccttaccgatactgcgtcagcagacggttgatatgggccgtcattatcggttggatctggtgttacgccagctggctttcgggattgaaaaggatctgcgccgtagcgggttttgtgccgggcagtgtcaggggcgttcgctgctgattagccatgcggcaggggaagcgccgggcagctgtgtgatcgtggcctacgatcttgaccgcaatggcaactgggacagcggtggcgatgccgagtattttggttaccgcctgcgggccggtgggctggaggggcaaagcggcgtgatccagtgccaaggcagtggctgggaacgtttgctcgatcaggaagcggtccggattgagtctttttctgtcagccagattgcagggcgcgatggcaaatccttgatgttgtttgccctaagtggccgctcaacggtgcgggcaaatatagaacgccgcctggagtgggcggttagcatggaggcaccctagagatggataggcagcaggggggcagcacattggctgcggtgatgctgttgctggtaatggggctgatgctgctcaccgcccagcagcggcaattggacagcgcgctattgctggctgtcgatcagcaacgttacctgcgggcctataaccaggcggcttcggcactaagctgggggctggcgcagtcgtggccacgggagtctctacaggcggaccattggtcctgtcagcagataagcggcgaggcgctgcaagcctgcgctcggctctctgcccgtaccggtttggtgatggttcgtggggctggggatatcgcgggatctgagcccttgtggctataccaactggctacacaacaaggcggggctggcggccacctgctgaaagcgcaaaaaggcggctggctggatttttgcccggaaaagcgggaaagcgattgtgctgaataaacggacaggctggcgaactcaacggggtttcagcctgcctgaagtgttgatcgcggcattgttgttcgccgtctcgctgctcgggctgttacactatcagcaggtgttgttgcaggcttttcaacggcagtggcaatatcgacaggcctggtcgctggcgcaccaacagctggaaatattcagtgccggtgccgaaataaaccatgccatatcgctaccgcctaattggcattaccaagtcgaaaccctccaggcgcaaggctcatgcctgaagcgcacggtgaaaatacaaacgccgctgcagcaacaggttgaactcagccgttggtattgcgggctgtagcgtgggccttacatgtagcgcccctatgtagtgggccggtgaggtttgtcagtcgtcttgatcgatatccctctctatattggtcgaggtgttctcgatcggttccctctccctttgggttagggttagggtgaggggacgttgagtcagtagttggtaatgcccttttacgcttccaaggagcctcatgtttacggtttatcattccaatcagttggacttgctgaaaacgctgaccagcgcgctgatagccagagaacctttggccgatccgtttcaacaggaagtggtgctggtgcaaagccccggtatggcgcagtggttgcagatgcagctggccgagcagtttggcattgccgcgaatatcgttttcccgctaccggcgacctttatctgggacatgttcaccaaggtattgcctggcattccgaaagagagcgcctttagcaaagatgccatgacctggaagctgatgtggctgctaccaggcatgctgacccggcccgagtttgctcctttacagcattacctgaccgatgacgccgacaagcgcaagatccaccagctcgccgggcgcgttgccgatctgtttgaccaatatctggtttatcgcccgcagtggctggagagttggcagcgtggggaggtggtcgaagggctggcagaggcgcaaagctggcaagctcctctgtggcatcggttggtggaatatacccacgagctgggccagcccgaatggcaccgcgccaacttgtatcgccggtttatcagcgcgctggagaatgccactcaatgccctgcggggttgccgccacgggtatttatctgcgggatttctgccttgccgccaatctatctggaagcgctgcaggctttgggtaaacatattgatatccatctgatgtttaccaacccttgccgctattactggggtgacattcaggactacgccttcctggcccgtttgcagagccgtaaacgccgtcactatcaccaggcacgcgagcaaggcttgttccgtcagccagaacaggcagcccaactatttgatgccgagggtgagcaacagctgagtaacccgctgttggcttcctgggggaagctggggcgcgatcatctgtatttactgtcgcagatggaggcggtgcaggaagtggatgcctttgtggagatcccggcagatagcttgctgcacgctattcagcacgacatgctggaactggaagatcacgcactgatcggcaccacgccagaaaccctggagcgcagtgacaataagcgccagctcgatccgcaggatcgttccatcagtcttcatgcctgccatagcccgcagcgcgaagtcgaggtgctgcacgatcggttgctggccatgctggcagaagatccccaccttaccgcgcgcgacatcatcgtgatggtggcggatatcgacagctacaccccgtatattcaggcggtgtttggcaatgcgcccgccgggcgctatctgccgtttgccatttccgatcgtaaggccaggcaggcgcatcccgcgctacaagcctttatttccttgcttgatctgccgcaaagccgttttacctcagagcaggtattggcgctgttggacgtgcccgcgttagcggcgcgtttctcgattcaggaagaggggttaagcctgttacgccactggactggcgaatccggggtacgttgggggttggatgatgacaacgtgcgtgagctggatctgcccgcaaccgggcagcatacctggcggtttggcctgacgcggatgctgctgggctacgccatggacagtaacgccggagattggcagggcgtattaccttatgatgagtcgagtggattagtggccgaactggccgggcaactggccgatctgctggcacaactcagccgttggcggcaaatcctcagcgaagagcggccgttagctgaatggctgccgctgtgccgccaactgctcaatagcttctttgagacggacagcgaaacggaagaggcgttggcgctgatcgaagagcagtggcagaaagtggccagctttggcctggcggcacgctatcccgatgccgtgccgttaacgctgctgcgcgatgaactggccgcacggctcgatcagcaacgcatcagccagcgtttcctggctggccagatcaacttctgtaccctgatgcccatgcgttccattccgttcaaggtggtctgcctgctgggcatgaacgacggtgtctaccctcgcaccttgccgccgctggggtttgacctgatggcgcagcagattaagcggggcgatcgcagccgccgtgacgatgaccgctacctgttcctggaggcgatcctctctgcccagcagcagctatatatcagctttattggccgttccattcaggacaacagcgagcgctatccttccgtattggtcactgaactgttggaatatctgcagcaaagctattgcttgcccggcgatgaagggctggatgcggacggcagcgcacgcagggtcggtgagcacttgcttaaacgtcatgcgcgtatgccgtttgctgcggaaaacttcctgccggggagtgaagatcaaagctatgcggcggaatggttggccgctgccgatggtcgtggtgctgcacatccggaatttaatcaaccgctggcggtggaagagaaaacccaggtttctcttgatgaactgctccgtttttaccgccatccaatccgtgccttcttccagctacgtcttggcgttaactttattctggaagagaccgaactgccggaagacgagccttttacgctggataacctcagccgctatcagttcaacagccaattgctgaacacgctgatcgagggggaggacgccggcaagttataccaacgggtacgggcatcgggaggattaccttacggagctttcggtgagatttactggcaaaagcagcaggaagaaatggcggagctggccgaacgggtgcgtgaacagcgccaggagaatggcagcctggagctggatatcgacgtggcgggcatgcgtatcaccggttggctgcatcaggtacagcaggatggcttgctacgctggcggccagcaacgctttcggccgtagacggtatcttactttggctggagcacctggtgtattgctgcgttggtggtagcggcgaaagccgcatgtttggcagcaagaattccgcctggcgcttcgctgcgcttacgagcgaggaggcccatcagcagttggctgagctagtggcgggctaccgccgtggcctgtcgcagccgctgatgctgctcaataaaagcggctgggcctggttgagccaatgttatcaggcgcaaacgcagcagatagactgggatgaagaagtccaggtcaaggcgcgtgccaagctgctgcaagcctggcagggcgatcagcggatcccgggcgagggggcagatccctatacccagcgcgttttccgccaaatggataatgttcgccttgaacaaatcctgaaagaaacagagcgttacctgctgcccgtggcccgcaataacctggggtaacacccccctcggtgatacaggtcgcagtgagatgataaaaattttacgcttttatactcaaccattgaggttaagtctggtcttacataacgtataggcatatacgttgtagacgtggcgtacgttacgcccccaacgatgtgggctatagtgagttgagtgtttaaaaccgtaatgctttgagttagaaattgaatttcattaggcatcgcttccggttgtgtcattttgcaccatgctgtcaccgtcagggagttggcgtgacagccagagaacaggggtttattttggatatgcgcagactgttgacccgcattaccgggttgatgttattggttatgttttgggcgccgttaagttgggccgcacaaggctggcaaccgctggcggaaaagatcaacaaaagcgatcacgatccgcgtgaatatcaggctatcaagctggataacggcatgaccgtgctgctggtgtctgactcgctggcaccaaagtcactggctgccctggcgctgccggtaggctcgctggaagatcccaacagccaacttggcctggctcactacctggaacatatggtactgatgggctccaagcgctatccagaacccgaaaacctctccgagtttttgaaaaagcacggtggtagccacaatgccagcaccgcgtcttatcgcaccgcatactatctggaagtggaaaacgacgctttagaacccgctgtcgaccgcatggccgatgccattgccgaacccattctcgatcccggcaacgcggaccgtgaacgcaacgcggtgaatgccgagttaacgatggcgcgctcccgtgacggtatgcgcatggcgcaggttggggcagaaaccctcaatccggctcaccctagcgcacgtttttctggcggcaacctcgagactttgcaggacaagccaggcagcaagctgcatgaagaactcgttggtttttatcagcgttactattctgccaacctgatgaagggcgtgctgtacagcaaccaatccttgcctgaactgagagcgctggcggtcaaaaccttcggccgcattcctaaccacgatgcgaaagtgccaccgatcaccgttccggcggccacctcggagcagcagggcatcattattcattatgtaccggcgcagccacgtaaacagcttaaggtcgaattccgtatcgataacaacagcgccgagttccgcagcaaaaccgatacctatatcagctacctgattggcaatcgcagcaccaatacgctttccgactggctgcagaagcaggggctggcagatgccatcaatgcaggtgccgacccgatggtcgatcgcaacggcggcgtattctcaatcagcgtttccttgaccgacaaggggctggcagagcgtgacaaggtggtggcagcgatcttcagctatctgaaaatgctgcagggcgaagggatcaaacaaagttattttgacgagatcgcccatgtgctgaatctggatttccgctacccgtcgattacccgcgacatgaattatatcgaatggctggtggacaccatgctgcgcgtaccggtagagaatacgctggatgcgccgtacctggccgatcgctacgatcctaaagccattgctgaacgcctgagccagatgaagccacaaaatgcgcgtatctggtttgtcagcccgaatgagccgcacaacaaaacggcatactttgttgatgcaccttatcaggttgagaaaatcagcgcggaacgcttcgcgaaatggcagcagttgggtaaagatatcgcgctttctctgccggggttgaacccttatattccggatgagtttaccctgaacaagccctcacatgagtttaccaaaccggaaatggtggtgaaccagccagggctgcgggtgctgtatatgccaagccgctattttgccgatgaacccaaggccgatgtgacggtagctttgcgtaacgccaaaaccatggattcggcgcgtaatcaggtgctgttctcgttgatggattatctggcggggatctcgctcgatgagttgagctatcaggcttcggtgggcgggattagcttctctaccgcgcccaataatggcctgatgtttagcgccaatggtttcacccagcgcttgccacagctgttgacctcattgattgaaggctactccagctttaccccaacgcaagagcagttggaacaggcgaaatcctggtatctggaacagttggattccgccgagaagggcaaagcctttgagctggcgatccagccggtacagatgctgtcccgcgtgccttactccgagcgcagtgaacgccgtgaagtgctgaaaaccataacgttgcaagacgtgctggcttaccgcgacagcctgatggccggggccacgccggagttgctggtagtgggtaatatgagcaagcaacaggtggacacgctggcctcttcactgaagcacagcctgggttgtaccggtgtggaatggtggcacggcgaaaacgtcgtgattgataaaaaccagtttgccaatctgcaacgtcctggcagcagcaccgattctgcgctggcggcagtgtatgtcccaacggggtatgacgaagtgaccagcatggcgtatagctcattgctggggcagatcatccaaccttggttctacagccaattgcgcacccaagagcagctcggctatgcggtgttttcctttgcgatgccggttggccgccagtggggcatcggtttcctgctgcaaagcaacagtaagcagccagcctatctctaccagcgctaccaagacttctatccgaagacggaaaagcgcctgcgtgagttgagcgatgccgattttgcccaatacaaacaggccatgatcaatgagctgcaacagcgtccacagaccttgggtgaagaagctggccgtttcagtagcgatttcgatcgcggtaatttcgccttcgatacccgtgaaaagctgatcgcccaggtgcagactttaacgcctgccaaactggcagattacttccatcaggcagtgattaagccacagggtctggcactgttgtctcaggtgagtggcagcagccagcagaaagccgactttgctgcgccgggtgaggcttgggtaacctatcctaacgcctcgtcactgcaaaaaacgctgcctcgtaaagtggcgacaccatgacgaaaggcgttcctcagcggcttgatccactgacgttgccgctgtttggtgaacggctgatcgaagcctcggcagggacagggaagaccttcactatcggcgctttgtatctgcgcttgctgcttggcttaggccaggcagcggcgtttccacggccgctcacggtagaagagatcctggtggttacctttaccgaagcggcgacagaggaactccggggccgcattcgcagcaatatccacgcattacgtattgcctgcgtacgcgggcatagctcagacccgctgtttgccgcgctgatgacggaaattgacgatctgccagaggccgcagcgcaattgctggctgccgagcgccagatggacgaagcggcgatctacactatccacggtttttgtcagcgaatgctcactcacaacgcattcgagtcgggcattctgtttgaacaaacgctggtgcaggacgaactgccgttgcgccgtcaggcctgcgccgatttttggcggcgtcactgctacccattgccactgggcgttgcccgggcggttagtcaggagtggagcggcccagaggccttgttgagcgatctctcaggctatctgcatggcgaagctcccactctgcgtcagccccctaaagatgaagaaacggtgctgatgcgccatgaacagatagttgcgcggatcgatgccctcaaggcgcaatggcaggcatcggcggccgatctggaagcgcttatcagtcagtctggcgtcgacaaacgcagctacagcagcaaacatttacccaactggctgaataaggtcggggaatgggcgggccaggaaaccgaagattaccagttacctaaagagctggagaagttccgccaatcggtgctgctggagaaaaccaaaaaaggtgaagccccgaggcatccgctgtttgtggcggttgatgagctatttgccgaacccttgaccctgcgtgacctgatcatggcacgggcgctgagtgaaatacgcctttctattcaacaggaaaaacgccagcgtgccgaactgggttttgacgatctgctcagcaggctggatgcggcactgcaaagcgccggtggtgaacaattggcgttggcgatccgtcagcgttatccggtggcgatgatcgatgagtttcaggataccgacccacagcagtaccggatcttccagaaactgtatgttggccgggaagagtgtggtctgctgctgattggggatccaaaacaagcgatttacgccttccgtggggcagacatttttacctatatgaaggctcgctcggaggtaagtgcccactacaccttagagaccaactggcgctcatcaccggctatggttggcagcgttaaccgcctgtttgctcaggtggaaaagccgttcctgtttggccaaatcccgtttatcgaggtggctgccgcagcgaagaatcaggaactggtcttcgagtggcagaataaaccgcaaccggccatgcaattctggttgcaacccggggatggggccggagtaagtgattaccaacaattaatggcgcgcttgtgcgcagcccagatccgcgactggctgagtgccgggcaggccggagaagcctggctggtcaaaggagatcaacgccgtcacgttcaggcatcggatataaccattctggtgcgtagccgcgccgaagcggcgttggtgcgtgacgcactcagcgcgctggccatcccctcggtttatctttccaaccgtgacagcgtgtttgatacgccggaagccaaagatttactttggctgctacaggcggtgctggctcccgaacaggagcgaaccctgcgttgcgctttggccaccgggctattggggttggatgccttgacgctggatgggctaaaccataacgagtccgcttgggatgatttggtcaacgagtttgatgaataccgtagccactggcttcgccgtggcgtgttaccgatgctgcgtgaggtgatggccaagcggcatctggctgaaaacctgctggccagcccaggtggcgagcgccgtttgaccgatgtcatgcacctgggggagctgttgcaggaagccacggcgcagttggatggtgaacatgcgctggtacgttggttggcgcagcagattgctcagccgaatcgccagtcggataatcagcaactgcggctggaaagcgaccgtcatctggtgcaggtgatcactatccacaagtcgaaagggttagagttcgatctggtgtggctgccttttgtggggaatttccgtcaacagcagcaggtgctataccacgatcgccagacctttaaagccctgctggatcttaatgccaacgaagaaagcgtggcctgggcggaagaggagcgtttggcggaggatttgcgcctgctgtatgtggcgctgacacgttcggtgtatcactgcagcatcggtattgcgccgttgttcctcggtacgcgcaagaaacagggcgatacggatttgcaccgcagtgcgctgggatatctggtgcaggctgggcaggcgggcgatgcggcctatctgcaaacctgcctgcagcagttggcaacccaaggcattgcgctgtcgctggtggatgcgccaggtgaacagagctggcagccgcagacggcaaccgccgcagaactggcggccaggcagttcccacgcaggatgcaggacttctggcgggtaaccagctataccggcttgcaacagcatggctcaagccggatgcaggagctgttgccgcgcctggacgttgatgccgttggtgagggcgatacggttacaccccccgcatttactccccatactttcccgcgcggtgcggcccctggcactttcctccacagcctgtttgaggagctggattttacccaaccgctagatgagcagtggctgctggagcagttgcaacaccaagggctggaggagcattggttgccggtattatccggctggatgcacgtgctgctgaatgcgccacttaatagcagcggcgtcgcgctatccgccttaccgtcgggagccaggcaggcagaattacagttctatctgccgatcgctggcctgctgcaagcgcagcaactggatgagttggtaaaacgctacgatcccctttctgctggctgcccggcgctggatttccaacaggttcagggcatgctgaaaggctttatcgatctggtattctgctggcagggtaaatactacctgctggattacaaatccaactggctgggcgaagacagcagcgcctatacccaagaggcgatggcgcgggcgatggcggaacaccgttacgatttgcaataccaactctataccttggcgctgcaccgctatctggggcatcgcctggcggattacgattaccagcgccattttggcggggtgatttatctgtttttacgcggggtagatgccgagcatgagggcaacggtatttttgcctgtcgtccggagtatgctctggttgaaggaatggatcgcctgtttagcggtgaaacggccaacgttgaggatgggcaatgattgagattttgcatcaggcgttggctctgggcgccttgcgaccgctggacgtgcaatttgcccaggtggttgccaacgatgatgaaccggatatcctgctggccgccgcctgcctgagctcggaggccggtgcgggccacgtttgtctgttgctcgaacagctattgccggaaaatctgtttgatggccgccagcctgagttggccctggctgcctggcaggcctgcgggcaaccggacgtggcgagttggcaacagcgtctggcgagatcgcctgcggttagcgatggcagtacggcaacgccgatggtccagcaacagcagcggctgtatctgcagcgcatgtggcagagcgaaggtgacgtcgccacttttatcagtagcgacagtgtgccacaggaacttgaagaggcgcagctacgcaccattctcgatcggttatttggcgtggctacggacgaacccgactggcaaaaaattgccgcagcggtagccgccacgcgccgcatcgcgattatttccggcggccccggcaccggcaaaacgaccaccgttgccaagctgttggcggcactggtgcagttggcggacggggagcgtctgcggattcaacttgctgcgcctaccggtaaagcagcggctcgtctaaccgaatccctgggaagcgctagccgtcagttggatctaaccccggagcaacgggctctgttccctacggaagcggcgacgttacaccgcttgctgggggcccagccaaacagtcagcgcatgcgttatcaccgggggaacccgctgcatctggatgtgctggtagtggatgaagcttcgatggtggatttgcccatgatggcaaggttgattgctgccttgccccccaaggcgcgagtcatcttcctgggcgatcgcgatcaactggcctcggtggaggctggagccgtgctgggggatatctgccggtttgccgagcagggatatagcgaagcccgtgcggcacagttggcgcgtctgaccggttgccccgtgcaagggcagccagcggaggccgaggcagcggtgcgcgatagcctgtgcctactgcgcaagagttaccggtttgatgccaaatccggcattggccagttggctttggcggtgaatgctggcgatagcaagcgcgccctggcagcgttgaacggcagctatgccgacgtagctggttacccgctggcagaaaccgaagattatcaacggctactggatagctgcgttgccggttatcgcgactatctgcggctggtggcagaaggggcgggggccgtgacgatcctggatgcctttggccgcttccagttgctttgcgcactgcgcgaagggccatttggcgttgccgggctgaatgagcgtatcgaaagcgggctgcagcgtgccggtttgattcgacgtaatcctggccccgccgggcgttggtatttagggcggccggtgatgattggccgcaacgatagcgcgctggggttgtttaacggcgatattggcattgccttacctggtgagggcggcgatctgcgtgtgcatttccaattaccggacggcagcattaaatcggtacagcctagccgcttaccggcgcatgaaaccgcctatgcgatgacggtacataaatcacaggggtcggagttcgaccatacggcactagtgttgccgaatcattttctgccggtgctgacccgcgaactggtttataccgccattacacgtgcacgccagcggctttcgctgtatgcggtagacaaggtgttggtaagcgctatccgcacccccacgcagcgccgcagtgggttggccgaacgcttgcagatcgggaagtaacaacgagggggcgcagcacgctgcgcccgtcatgataacaatgggttagccagggtaagtcaaagatcggccaacaggatcttcgagcggcgctggtagttatataaagcctgtttctgcatcggcagcacgtcgacttcggccggagtgaagccgcgttcctggaaccagtggatactgcgcgtggttaacacaaacagcttctgtagccccatctggcgcgcctggctttctacccgctgcagcagcatctcgccccgcgacgagctgcggtaatccggatgtaccgccacgcaggccatctcaccaatcttctcttccgggaacgggtagagcgccgcgcaggcgatggtcaggttatcgcgttcgataatcgtgaacttgtcgatttccatttccaactgctcgcgcgaacggcggactaaaatcccttgctgctccaatgggcggatcagctcaagtatcccaccgatatcattgatggtcgcccggcgtacctgttcggcactctccatgacgatttgggtaccaataccgtcgcgtgaaaacagctcctgtaccagtgcaccatcctcctggtagctgatcaggtggctgcggcgtactccgctgcggcaggcctttaccgcgccgcgcaggaagcgcacggtgccggaatggtagtcacctgcctcttccaactgctcgatacgcttttgtgcatcgttggggaacagttcggaaaggatattgccttccgcatcggtcaccccttgtgatgaacagaaaccgatcattttctcagccttcagcttgattgccaactgggtggcgacttcttccgaggtcaggttaaagctttcaccggtcaccgataccgccaccggaccaatcagcacgatagccttactgtctagttggcgatgaatggcttcttcatcaatacggcggatacggccgctgtggcaataatcgacgccgtcatccacgcccagcggttgagcgataataaagttgccgctcactacgttgatgtgcgccccttgcaatggggtgttattcaggctcatggaaagccgtgcggtaatatccagctgtaacaagccagcggcctgtttgaccaactctagcgtatgggcgtcggtcacccgggtatgcttatggtaaatcggctcgtagttatgctgcgccagattgttgtcaatctgcggccgcgcaccgtagaccaccaccagacgaatgcccaggctatgtaacagcccgatatcgttgacgatactggaaaagttttcatgttcaatagcttcgccacccagcatgacgacaaaggtcttgccacggtgagtattgatatagggaactgagtgacggaatccttgcaccagctctgtactacgttccttcacggcaagacctcatttgcatatttatacggtatttttgtatttttattcttttattgcgccaaaggcaagtaggaaatgagcacgatttttctgacaaatgcgctaactgattaataaattgaaagatcataaaaagattttctgatgacagcagtgaatggattgggtaaagtttttgccattgtttttttttgctgtttttttaatcgttatttttaccggagccgcatgcctaactctaatcacaatccgggccgccgtcgtttgttgcagggggttgccgcaacctggttgctgagtgtgagtcgcgttggtttcgccgctgcttctcatgtgattgccgtccgtgtctggccttcctcgacctatacccgagtcacgctggaatctaatgttccactgaaatacaaacagtttgccctgaccaatccagagcgcatcgtggtggatgtggaaggggtacagctaaatagcgtgctcaaaggtatcgccgggcaggtgcgcaaagaagatccctatctgaaacaggcgcgggtcggccagtttgacaagaataccgtcaggctggtgctggaactcaagcaaagcgtcagcccaaatatgtttaccctgacacccgtctccgaataccgcaaccgcctggtgatggatctttatcctaccaaggggggcagcggtgaagagtatgatccgctgttggcgttactggaagattacaacaagggcgatctggagcggacgttaccggcagaagcaccgcaggccggtaaggctgggcgcgatcggccgattgtgattatgctggatcctggacacggcggtgaagatccgggggctattggcaaaaacaaaacccgtgaaaaagacatcgtgctgcagattgcccgtcgtctcagtgcgttgatcaaacgcgaacccaacatgaaagtgtttatgacgcgcaatgaagacgtgtttatcccattaaaggtgcgcgtagccaaagctcgtaagcagcgggccgatctgtttgtttcgatccatgccgatgccttcagcaaccgtgcggcccgcggttcctcggtgtttgcgctttcgaccaaaggggcaaccagcaatgccgccaagtttctggcgcaaacccagaacgccgcagacgacattggtggagtcagcaagagtggcgatcgctacctggatcacaccatgttcgatctattgcagaccgctaccgtcaatgacagtttgaagttcggtaaggaagtgctgcaccggatgggtaaaattaaccgtctgcacaagaatcgtgtcgatcaggctggctttgccgtattgaaggccccggatattccgtcgatcctggtggaaacggcatttatcagcaatctggaagaagaacgcaagctgcgcaccagccattttcagcagcaggtggcgcaatctattctggctgggatcaaagcctatttcgccaacggtggcgcattggcacggcgttaaaccaggcgtagcccaaggaggggcagcgtggttgattagcaaggcaggggaaattcagatacaaaaaaacacccgttaaggtgcttgtctgatgttatcaagattggttgcgggggccagatttgaactgacgaccttcgggttatgagcccgacgagctaccgggctgctccaccccgcgtccgtcttgatactgatattatcgaaccaacccttcataggatactgctattgccgtatcggttggttgcgggggccggatttgaaccgacgaccttcgggttatgagcccgacgagctaccaggctgctccaccccgcgtccgtataataccttttctttcatcgaatccaacctgtttttgataccgttaacacagtatcggttggttgcggaggccggatttgaaccgacgaccttcgggttatgagcccgacgagctaccaggctgctccaccccgcgtccgatggaagcgcactatactctccaggcattttgttgcaaaccctttttgcatataattcatcgaaagccatttttatgctgaattagtccacaatttgcgttttttttcatcataatcatctggctgggaatttttagcggtagcgattcctttatctatagccgtttgttatcgttcagccagtttacccgtatccattgggtatggaacatatcagtctgagagagtgtgcaatgaaaggacgttggggcaaatacctgctcggtggggtggtgattgcggtactggccggttgttcgtcaaaaccgaccgaccgggggcagcagtataaagatggtcatctggatcagtcgctggagttggtggatcgccccaatgccagaggcgccccgatcaacggccaggattactccaatcagctgatggagattaaatacgcttcgccgtcgctgtttaaccgcaataactccacctatcaggcggtgcaaaactggatggcggcgggggcggatacgcgccaactgaaccagttcggcctcagcgcctatcagatggaaggcgtcgatagctatggcaacgtccagttaaccggttattacaccccagtgctgcaggcgcgttatacccaacagggcgaattccgctacccgctgtacagcatgccagccaaaggcaagcgtcgcctgccggatcgtgccggtatctattcaggggcgctggacagccgttacatcattgcttacaccaactccctgatggataacttcatgatggaagtgcagggcagcggctatgtcgatttcggcaacggtcagccattggtgttctttggctatagcggcaagaatggccacgcctaccgcagtataggcaaggtgctgatcgatcgcggtgaagtggccaaggccgatatgtcgatgcaggccattcgccagtgggcggataaccatagcgaagccgaagtgcgcgaactgctggagcaaaacccgtcgttcgtgttcttccatccggtgcctttcgctccggtgaaaggggccagcgcggtgccgctgattgccaaagcctccgtggcttccgatcgctccctaatccctgccggtactacgctgctgacagaagtcccattactggacaacaagggcaagttcacgggaaaatatgaaatgcgcctgatggtcgccctcgacgtgggtggtgccatcaagggtcagcactttgacatgtaccaggggattggaccagaagccggtcactcggcagggttctataatcactatggccgggtctgggtactgaaaggcggtaatcctggggcacagctgtttagcgccaatcaaccattgaccgcctcgagtggttcccagttggtgactcgctgagaaagacggtatatagcttgacgcgcagggccggatcttccggccctgactatttgcaaccaaggtaagtaaagcgaaatgagtacagcctattcagaggcctatctacagcgttttggcggcacggcgcgcctgtacggccagccggcattggccctgtttgcccaggcacacgtttgtgtgatcggcattggtggggtcggttcatgggcggcagaagcgctggcacgaaccggcattggtgcgatcacgctgatcgacatggatgacgtatgcgtcactaacaccaaccggcagatccatgctttgcgccagcacgttggccagtcgaaaaccgaagtgatggcggaacggatcctggcgatcaacccggaatgccgggtgacctgcgtggatgattttattaccccggacaacgtcgccgagctgttgaaccataatttcagctatgtgattgatgctattgacagcgtgcgacccaaagcggcgttgttagcctattgccgccgcttcaagatcccggtggtgactaccggcggtgccggtgggcagatcgatcctacgcagatcgccgtggccgatctggccaaaaccatccaggatccgctggcagccaagctgcgtgaaaggttgaagaacgactttaacgtggtgaaaaacagcaaaggcaagctggggatcgactgcgtcttctccactgagccgctggtgtatccgcagccggatggttcagtgtgtgcctcacgcagtaccgcagaggggccgaagagaatggattgcagcgcgggttttggcgcagcgaccatggtcaccgcgacctttggttttattgccgtctcccacgcgttgaagaagatggtggcaaaggcagcacgtcaggcatagctggcagcgatggcgtgaatcctggctgccaatgcagccaggccgctagctcgggtggcgctgagctgggcacgcagcgccaagctatcaaacaaggccaggggatcggtagctaatacctgctgcggcgttttaccttcgactgtggttagcaggatcgccagcaagccacgcacaatgcgtccttcgctgtcgccataaaaatgcagtgttccatcagccaacaactggtgccccaaccagacccggttctcgcaaccgctcagttccatctccgtttgccgcaggtcgtccgccagcgatggtaagcgtttcgccagcatgatcagttggcggtaacggtcttcccactgttttagcgcgctgaaggttgctataagcgtctcggcggtgatttcacggccaaaagggtgaggggcaagcatcggttctccgttttgcatcttattccgccagtaattcgatggcgttagttaacgccagcaccagagcatcgacgtcttgcggcgtattataaggcgcaaatgacgcacgtaacgttccgctgacccctaatgcggcgatcaagggttgggcgcagtgctggcccgcgcggaccgcgatgttctgttcggctaacagggtgacgatatcgctgtggtggatcccggcgatatcaaaggccagcaggctggagccggaactgcggaagctgcgaaatccgggtaactgctgcaaacgctgttcggcattttgcgccagagcgcggctgtattgctcggcggcggccatatcctgcgtttccagccagctcaacgcggcacccagccccagcactccggcaatatttggcgtaccggcttcaaaacagtgcggcggtttttgtggcgtaaagccgctgaaagaagcctgtgtcagcattttccccccgccttgccacggccccatttgggccagcaacgcggttttgccatacaacgcaccaatgccagttgggccatagagtttatgcgctgagaaggcgtagaaatcgatatcgagccgctgaacgtcggcagggcaatgcacaatgccctgtgcgccgtcgatcatcactaccgcgttcaccgcatgagccaactcgatagccagcgcgatatccgggcagcctcccgtgacgttggacatttgccccaaggccagaatgcgggttttctcgcacaatagggtagggagcagcgtcaaatctggcaggcgatcggggccaagcggcagcttcaccacttcggcaccggtctgttctgccaccatcaaccacgggatcaggttggcatgatgctccgcctcgctaaccaggatctgatccccaggttgcaggcgtgggcgagcatagctctgcgcgaccagattgatggcttccgtggtgccacgggtccaaacgatatcgtccgcacagggggcattaatcaaggtggcgacctgctggcgtgcctgttcaaagcgctgggtcaaatcctgcgccgcacgatgttggctacggtgtacggtggcggcatctgcgctgtaaaactgctgcgtggcgtcgatcaccgcctgcggttttagcgcggtagcggcactgtccagataaattcctgcctgttgaagggccgggaactggctgcggaacaaggtaggctcaaaaggcttcatcggctgattatcagtggctttgtcagccattgatcctgtcctattttagtgtcagagacaagttatcccgatcaattgtcgccgtttcctggaaatctgacgaaagtttgttatgctgaatattggcgcgctaatgagttccttaaataacagaagtgagttttacagcatttttatctacaaggagtcacaaatgaacaagacagccgcagttatctctgccctgatgctcacgtttaccctggcagcctgctcaagcaactacgtcatgcataccagcgatggacgcaccattgttgccgatggcaaacccaaggtggatgacgataccgggatgatcagttacaaagacgccaacggcgttcagcagcagattaaccgtgctgacgtgaaggaaatggttgaaggtaatcagtaattttcagataaaacagtaagtttcaggcaaaaaaaagcaccgcgaagttggcggtgctgcataaaatcactatggacagacagggtaaatgtacaggaagtgaaaaacagtagcctagctaccatgtccgaattggcggacaaattgcaaacacaacatcacaaccacaagccaaaagttcatcggcgtcctcgacacccaatcccttttcgttccggcccaggaagtgtcgccactataggtatttactggcgcatgctcaacggacaatttataatggctcggattaaaaaaactaatggcaatagtccatgcggatgggctagtggcgttatgtatcgtgcagcctgatctcgtttgcgaaacccggcggccatttgttacataaatgtaactaaagccgatgaattgcagattggccgcttaggcgtatccttgcgctcgcggcatttgaacatccctgttcggcacagccaggcggcggtaaaggcgcattcagccgacaacgccgcagtttgcaatacaaaagggttaattcatgtctaaacgtctccctcctcttaatgctctgcgggtttttgacgctgcagcccgccatttgagctttaccaaggcggcagaggagctgtttgttacccaggccgcagtcagccatcagatcaagtctctggaggatttcctggggctgaaactgtttcgacggcgtaaccgttcgctgctgctgacggaagaggggcagagttattacctggatatcaaagagatcttctcttcgatcaatgaggcaacacgcaagcttcaggcacgcagtgccaagggggctttaaccgtcagcctgccgcccagtttcgccattcagtggctggtaccccgtctttccagttttaactcagcttatccggggatcgatgtgcgtatccaggctattgaccgcgaagaagaaaagttggcggatgacgttgatgtggcgatcttttatggccgtggcaactggccgggagtacgcaccgagcgtttgtatgcggaatatctgctgccggtttgctctcccagcctgttaatgggcgatcatgcactgaaagtgccgggcgatctggcttatcatacgcttctgcatgatacttcacgccgcgactggctggcatacacccgccaactggggttacagcatatcaacgtgcagcaagggccaatctttagccatagcgccatggtggttcaggcggccgttcacggccaggggattgcgctggtgaataacgtgatggcgcaaaccgagattgaagccggtcggttggtctgcccgtttaacgatgtgctggtaagtaaaaacgctttttatctggtatgtcatgacagccaggcagaactgggtaaaatagccgcctttcgccaatggatcttggcgcgtgcggccagcgaacaggagaagttccgctttcgctatgaacaatagggccagttgcggtgacgttgtggctgggtaatttcgatttaggggaataatgatgagtagccgttctatgctgatttttgctgctatcagtggttttgtctacgttgctctgggcgcgtttggtgcgcacgtattgagtagtgcgcttggggtcaatgaaatggcctggatccgcaccgggcttgattaccaggggttccatactctggccatcctggggctggccgtcgccatgcagcgtcgggtcagcctgtggttttactggagcggagcgctgttggcgctcggcaccgtgttgttcagcggcagcctgtactgtctggcgctgtctcaccaaaaggtttgggtttatgtcacgccagtgggcgggacctgcttcctgatcggttgggcattgatgttgattggcgctttgcgtctgaggaaaaaggccgagcgccatgaataagatcgcgttgtactgccgccaaggctttgagaaagagtgcgcggcggaaattaccgacaaggccgcccagttggaagtgtttggctttgccagggttaaagacaacagcggctatgtgctgtttgaatgctatcagccggacgatgccgatcgcctggcgaaagaaatcccgttccgtgagctgatctttgcccgccagatgttggtggtgggagaactgctgcgtgatttgccgccggaagatcgggtttcaccgattgtcggcatgctgatgggcgtggtcgaccgcggcggtgaattacgggtagaagtgccggataccaacgaaagcaaagagctgctgaagttctgccgcaagctgactgtgccgctgcgcggcgcattgcgtgagcagaaagtgctgatggcgcgtgagaatccctctcgtccagtggttcacgtgttctttatcgcgccgggctgttgctacgtggggtattcctacagcaacaacaactccccgttctatatggggatcccacggctgaagttcccgtccgatgcaccaagccgttctacgctgaaactggaagaggctttccacgttttcattccggcagacgaatgggacgagcgtttaggtagcgggatgtttgcggtcgatctgggggcttgccctggcggctggacctatcagttggtcaaacgcagcatgatggtgcattcggtggacaacggcccgatggcccagagcctgatggataccgggcaggtgacccatcatcgtgtcgacggcttccgctttgaaccgaccaccagcaaaaactactgggtggtgtgcgatatggtggagaaaccggcaaaagtgaccagcttgatgatccaatggttgctcaaaggctggtgccgtgaggcgatctttaacctgaagctgccgatgaagaagcgctacgaagaggtggcgcagaacctgcaaagtatccacgaagccttggccaacgaggggattagcgcagagatccacgccaagcagctgtaccacgatcgtgaagagatcaccgtacacgtgcgccgcatgtggtcggctattcccggccgccgcgacgagcgcgagtaaggtatatgggcgttgctactggcagcgcccttactttgttggcaaacgtaactgttgcagattgccatccagcgtcagatcggtacgtagggtggcgacctgcttgctgatataggccagctcgcggtgctctaacagcttgccctgccacttctccggcacctgctccaggtgttgatacagaccatccaggctgcccatctgttgtagcagcaatactgccgtttttggcccgataccggcaacgcctgggatcttgctgctaccaatccctgccaacccccaataatctgtgagctgttgcggtaacacgccaaactcttgctgcacaaacggcatatccaaccagcgtttctggaagtagtcacggatctgtacgctgggtgccagtagttggcagtagcctttgtcggtggagacaatcgtcacttggtggccgccagcggcaattttggccgtcagagtcgcagccagatcgtccgcctcattgcctgcggaatgccaactggccaccccaagctcggcaaacgcttcgcgcagctgcggcatttcctgatgcaggttttccggcattggcgagcgtccggctttgtaatcgggcagaatttgatggcgccaactctcgctacggtcgtcttcgtcgaacaccgccacggcgtgggtgggctggctgtgttgaatcaactgctgaagcgcatgcttgcaagcgttgacgcaaggggagccctgcactgcatgaatgcggcggattaggttcagagcatcgacaatcagtaaatgtataggcataggcaaggcaacaacgtcagaaaagaagggcggctatgacgccgcccagaggtgatgatcaggctacaatctcgtagcaaggtacgtaggcggttcccggcagtttcatacggtgctgggcgacaaaaccttgcaacaggctgtccatctgcttcatcatcaacggatcgccatgcagcttgtaagggccgaactgttcgatggcatgaatgccgttctccttcacgttacccgccacgatccctgagaatgcacggcgcagagccgcagccaactgttccgccggttgattagggtacaggttgagattggccatgttttcatggcttggctcgaaggggagctgcaggtccggtgcaatacggatcgaccagttaaagctgtaggcatccccggtattacggcggttttctttcaccagtggcatggcctttttcatctgacgggccacttcggccggattgtcgatgatgatggtgtagtgacgacgggctttctcgcccagcgttttcatgatgaattcgtccagcacgcggaaataatctgcgctttctttcggcccggtgaggatcagcggcaatacctgttcgctgttttccgggttcatcagaatgcccaacagatacagtagttcttccgcagtgccgaccccgccagggaaaatgatgatgccgtgcgcgatacgcacaaaggcttccagacgtttttcgatatctggcatgatcaccagttcgttaaccagcggattcggcggctcggcggcaatgatggagggctcggtcataccgataaagcggctgttgtggtaacgctgctgcgcatgaccgacggcggcccctttcattggcgcttccattgcccctggcccacagccggtacagatattcagctcgcgcagacccagctggctaccgaccttacgggcatacagatattcgttttcattgatcgagtgaccaccccagcacaccaccaggttcggatcttcgtcgaggtgtagcgtacgtgcattacgcaggatggagaacaccagattggtgatatgaacagagtcttccgaattcaggtgttggaaacgttcggcgctgtcaatttggccgtggacaaacagaatatcgcgtagcaccgcaaacaggttggcttgtagtgaacgaataatgcgaccgtcaacgaaagcctcttctggcgggttcaccagctcgagttttacgccgcgttcacggcgcagcacgttgatatcaaagttttcataacgcgatagcaactgtttgctgttgtcggtctggctgccggagtttaataccgccagggagcagttgcggaacaaacggtacaggtcgctgctggcggttcgcttcagcatgtcaacttccagctgtgacaacaagtccatagcgccaagtgggctgatatgtgtaatcaaggtaactcctttgcgcccataaatagggcgataataatccttacctgcctctgcgcactgcggtaagaattttgtattgcctactggaatgcctgagcaaaaaacgggcactcttgatttaaccttaccgccgtctccggatttttaccaatacaaaccgcctgttagctcagttgttgagcattattggcgagccagacggccatgcgccggttcgaacgccacattgctacgccaagggttgatatccagacccccgcgccgggtatagcgggcataaacgctcaattgttgcggctggcagaaacgcagcagatcgttaaagatccgctcaacgcactgttcatggaattcgttgtgatggcggaacgaaaccagatagcgcagcagggcttcacggttgatctgcgggccacgatagcggatttgtaccgagccccaatcgggctggttggtgatcagacagttggacttcagcagatggctgactagcgtttcctctacgacttggctaccggcggcgccttctaggtagcctgtatcgaactcgtagttatcaatgctgatgtcttggtggtcaaggcattcgccctccaaccgggcgataaggctgccttcaagccgatctacgctgaacaggctcacgctgacatccccttgcgcgcaggcggcgagatcgcgttgaagcgtagaacgtaccgcttcccagtccgggaagtgggtctggttaaagctgttgagatagagcttgaagcttttggactcaatcaggttgatgctgttggcattcaggctgatttctcccaccgcaacctgtggcagccccttggcattgagccaggaaagttcatacagcgtccagatatcggccccgtggaacggcaggctatcgggataaagccccagcggttcccggttcatactgcgaggaaccgcttgtaacagtgaggcatcgtagcagtcacggtatgcggttggtttgcccagcgtcagtgccgccagagcctgatgatcttgataggaggacatgagctgtcaccttggtgtgagataggtacaataggcaccagtttaccgtatgcgagaaaaaatatggaccatgatgtatcgcacgccctgcgtgaatttacccagcgctatgtcgacgcttggcaacagcagtacggccatgccccggctagccaggaactgtacggtgtggcttccccctgtattgtcgaaaatcgcgatgatacggtgctgtggctgccgcagccgtttacgccagcggccagcctggaaaaggtggagcaggcgctggaactgcaactacagccggatatccacaccttctacacccaacactatgccggggatatgagtgcgcagtttggcgagcatccgttgacgctattgcaggtctggagtgaagacgactttattcgcctgcaggagaatctgattgggcatctggtgacgcaaaaacgccttaagctctcgcctacgttgttcctggcgaccacagaatcggaaatgacggtggtgtcgctgtgtaatgtcagtggcaacgtgttgcttgagcaatttggcagcaaaaaacgcacgctattagctgcctgtttgggggattttctcaatgctttacgccccagagttaattaatcggctaatttgtctttagtgcgtgtgcgagatctcttacaaaagctgtgagagatcgcttttaattttttactttagttggtgtttttttgataattaatcttatatatcaatttgttatatgtttatgctgatgtgggctaagtaaaatttactgtaatccatcctacttgcccttgttaacggaaaggaaataagcgatcttatgtctaccggaaggaagccggatggagcaggaaagcgtcaggatgatgcagcttcaggaagaagaaagggatgcactcaggaagagtgaaagggattggtatcaggatgatacacaggatgtttcaggattgaaaccaaggacacctccaggacggagatagagagccagcacaggattgttggtgggtcaggaaggccgaggaaccgcgtcaggatgatgctataggattttgcgaaggattgttttggtcaggatggccgaaaggaaaagttttcagggattgagcagggagcacacttgtagcgggattagctataaaacgaaccgggggcactgttaacgcagtgcccccaactttttgtctggagcaaaggccagacagcaaatcctgcctggcttccccctcaaggtttacccgattgcccccaatgtatcgcccgtgctttgttttttcggcagcaggaacaacgtggcgaaaatatccaacaggtagattgcagccagcaggctgatcgcggcggtaaaggaaacctgagtgaccagcgcaccgatcaccaatggccccagcccaccgacgccgcggcccaggttgaacaggatattctgcgctggggcaggagcctgtaccgggtaggtgtcantggcacgagcctgtaccgggtaggtgtcagaaatcagcgcgccgtagccgccaatcatcccgttaacgaacacccccatcagtgcacccgcaaacagcatcagcgtgggatcggtgagttgcgcatagcttatgaccatcaccacggctccaacctggtaaatgacaaagatgatccaacggggaaagcggtcggccaatatcccgaacagccagataccgaaggtcatgccgatcaccgtgactcccgtccagacgccggatttggtcagagagaagccaaagtttttggccagataggtcggcatccagatcatcagcccgtaatagccaaagttttgcaccgagcagaggataaagatccccaggctggccttgctggtggcgcgatctttaaatagcagctttaatcgttgagtaaaggagagttgctgttcactggttttttgctgcgtaaactctttgggttcgcccatggttcggcgaataaggaaggaaaccagcgccggcagcaggcccaccaggaacatgccacgccagccgatataaggtaacaacagcggggtgaggaaggctgcggcaagcacgccgagctgccaacccatgcccacataggctgaggcacggttacgcttctcagcgggccaggcttcggcgatcaacgccatgccaataccgaattcgccgcctagaccaatcccggccagggtgcgataggcaagcaagtcccagtaaccgacggcaacggcgcacaggccggtaaacagcgaaaacatcagaatagtgatggtcagcacgcggatgcggccaaaacgatcgctgagatggccgaagatcacgccgccaatcactgcgccgatcaatgtccaggtcaccagcgaaccggcttgtgatgaggtgagacccagttcagtagtgatcaccggcagcataaagccgagtatcaacagatcgaagccgtccatagcataaccggtaaccgaagccagcatggctttaccgggcgtagcgtgatttttattgagtgatgttgcgggcatgtcttttatcatgtgtgattgttgggtgcgcgtattgtgccgtgccaggcgtggcgccaccagataaaattgggtgctttgggcttaaatgttatgctttgcggcttgcagccgtaggctgattaacatgcttaaattgttcgggaatgtcgatgagtatatccaaccaggttcgccacaatttacaggcgattgaacagtccatgcgcgatctgacgctgtggcagttgacgccgccggaagccgaggcttttgccagcacggaacctttttgcatcgacagcatgcaggccgaagagtggttgcagtgggtactgttgccaaggatgcatgcgctgctcgatgccaatgcgccactaccaacgcgttttgccatcaccccctattttgaagaagcgctaaaagataaacagccgaactgcctgccgttgctgttgctgctacagcagctggattcactgcttaatatcgagctgtaatcgcgctgtatgttcgaccgtagggggcgccgcatgctgcgcccgcttagcctgtctgtcgtgaactcgttgcgttttatcagcaatttccgatttatgcgtggtaatgcgcaattcacgcggtatggctaaaatagagtttccaccgccgtgtggaactagtagataatgtgcgcattatcgcgagtcaccaaggagggtttctcatgctcaaacaaaatatattcggttggtcggggatcgcgctaggcggcctggcgctgttattggctatggtgcatttctatgccgggccatttgcccctcagcagacgttggaaagcctcgtggcgggcaaagcggtggccatcaaagaatcactgttggcctcattggctggccatcaaatccctgaaaaggtctcgcggcctcattatgatgtcgatcgaatattgaagatcgtcactgccgtattggcggtgggggccggggtcctgggcgctattgctggggcgtgtaaggaaaacccgcgcgcggtttctgctgcggtaatgctcggtattggcacgctggcttttcaaattgccatgtttgcttttggcgtggtcatggctatttttcttatttttttggtgttgtcactgatttttggagtgggtgcagtctgttagctgcctcggttccggcgtcgggaatgttgtctctctgggtgtctttcaaggaataaaaaggtgctgcaatcatggatttgctgaagtttatcctccgtttgccttttacgttgatcaaaggcctgttccgcctgttggccctgatttttggcctgttggggcggctgttcaagccggtggtgggcaacctgaactggaatgcacctgcctggtgggcagcggtatccggcggggtgaagcgcggcttcctgcggctgggaggggggggagacacctatcccaaagccattagcctgtcgttgctggtgctgttgtgcgccgcgggtggcgccttctacggatggcactggtggctgaatcggccacagccgattgaaccggcaccgatggtgtaccaggaaaccagcgtgcgggtatccgatcctgagccggttaactttgccgtgcagaaatctgcgccgcagcaggtcaccctcacctttagaaactccgtggcacccttgaccgatgtcggcaaggccgtagaaaaaggcatctccatcagcccagcccttgaagggcagtggaagtggaataatgcctggaccctggtcttcacgccgaaaagccctttgccgatgggcagcaaatatgaggttaagcttgagcctgccgtgttgctggccccgcagattaaactcgccaacaccaactacagctttagtgccccggcttttgactatcaacttgggcaagccgagtattatcaagacccacaagatccgcaaaagcgcagcgctatcttcaacgtcaaattcaatgcgccagtagacgtggccagctttgaaaagcagatcgccatggggttgatcgaagccaacgccaaatctgaaaagaaactcaatttctccgtggtctttgacgccaagaaactgaacgcctgggtgcattctgaaccgctgaaagcgctggatcacggtggtaaagtgcatctggtgctgggcaagggcatcaagtcggtggtgtctgccaatgagatcgctcaatcgaaagacagctgggtatcggtgccaaccctgtatagcctcacggtgaaggatgccagtgctcaggtggtcgatagcgatggcactaaaggccagcgtgcgctgattgtcgccttcagcgatgcgatcaaagacaaagatgccgggcgtgcggtcaaggcctggttattgccgcagcataaccctaacgactctgaagccagtaacgaaccggacgatttttatcagtggggcgggaccgagagcatcgaaaacagcgtgatggcccagtctacgccactgacgctgaccctgaatgaagcggaagagacctatcaaccgcagttcagcttcaagtttgacgcaccggctcaccgctttatgctgctggaaatcaccaacctgatgacttcttcgggcggctataaaatgccggagaaggtctaccgcatcgtcgaagtcccggacttcccgaaaaccttgcagtttatgtcacagggttctctgctgtcggtgaatggtgacaagcaaatcagcgtggcggcgcgtaacgtgcccggcctgcgtctggatatcaagcgggtgatcccaagccagctgcaacatatcgtctcattcaaaagcagcgaatactcttcggcccagttcaaccagcttaacgatgaatattttaccgaacactttaagtatcaaacggtaatcaataacgatcggccgggtgaagtgagctacaagggcatcgatctctcacgttacctctccaccagcacggattcccatcgcggtgtgttcctgctgacgctgtcagaatggcagccggaaaagaaaaagacgcaggccacagaggatgaaggcgatcagggcgagcaggaaggggatgattcaccaagcgtgggagattcgcgctttgttgtcgtgaccgatctggggattattgccaaacgttcgcaggataaaacgcgcgatgtgtttgtccaatctatccacagcggtgcgccagtcggtaacgccaaagtctcggtgatcgccaaaaacggcgtgacgctgcttagccaggtgactgatgccaatgggcacgtgcgtttccctgcgctggacgtgtataccaacgaacgcgagccggtgatgttcctggtggaaaaagaaggcgatgtgtccttcttgccgaccacccgctacaacgatcgcgggctggatttctcccgctttgatattgaaggcgaagaaactccgatcgatccacgtaccctgagcagttacctgttctccgatcgtggcgtgtaccgtccgggcgataccttcaatattggtctgattacccgtgcggccgattggggcgtagccctggctggcgtaccggtgcgtgccgaaatccgcgatccgcgcgacaaactgatgacgacggtgccgctgactctcggtggcagtggtttcaatgaattgagttacaccaccgatgagaacgcgccaacgggcgagtggaacgtctatctgtatctgattggcaaaaataacgatacttccaccttgctcggccataccgccgtcaacgtgaaagagtttgagccagaccaactgaaggtcaagctggagttgacgccgaaccggcagcaagggtgggtaaaaccttctgagctgcaggcgaacatcgatgtgcagaacctgtttggcacaccggcccaggatcgccgagttacctcgaagctgacgctacggccgatgtacccaagctttgatcgcttcccggattacgccttctttgaaaaccgccagaatagcgacggttttgaaacggaactggaagaccgcaccaccaacgagcagggcgtggcgaatattccgctggacctgaagtcctatgcggatgcgacctaccagctgcaactgctgtcggaagcctttgtcgcgggtggtgggcgttccgttgccgccaccgctcgggtgctggtgtcgccgtatgactatctggtgggggtgaagccagacggtgatttaggctatatcaaccggggttcggcgcgtcatctgaacgtgattgccgtcgatccgtccctgaaacagatcccgctcgccgatctgaagcaggtgttgatcgagcagaaatacatctcggtgctgaccaagcaggattctggcgtttataaatatcagtcgaagatgaaagaggtgcagttgtccgagcagccgttggcgctgagcgagcagggcaccgatctgaccttggcaaccgaaaccccaggtgactttgttctggtgattgaagatgcgcagggcaaggtgctcaaccgtatcgcctatagcgtggcgggcaacgccaacctcagccgttcgctggatcgcaatgccgaactgaagctgaaactgaaccaggcggaatatcagccgggtgaagaaatagaagtggcgatcaacgcgccttataccggcagcggtttgatcaccattgaaaaagaccgtgtctatgcctggcagtggttccacaccgataccaccagctcggtgcagaaaatccgggttccggccgggatggaaggcaacgggtatatcaacgtgcagtttgtgcgcgacgtgaactccagcgagatctttatgagcccgctgagctatggcgtcatgccgtttaaaatcagcaccaaagcccggcaaaacggcctggaaatagtaacacctgaggtaattaagccgggtgaaaacctgacgatgacggtgaaaaccgatggtcctcagcaggtggcactgtttgccgtagatgaggggatcttgcaggtagcgcgttaccgcctgaaagatccgctggagtacttcttccgtaagcgtgagctgagcgtggaaagctcgcaaatcctcgatctgatcctgccggaattcagcaagctgatggcactttcggcggcaccaggcggtgatgcgggggaagggctggatctcaacctgaacccgttcaaacgcaagcgtgacaagccggtggcctattggtctggcattaccgaagtcaacggcgagaagcagtttacctatccggtaccggattacttcaacggcaagatccgtgtgatggccatttcggtgacgccaagcaaaatcggcaaggcccaaacctccgcgacggtacgtgacaacttcatcatgacgccgaacgtgccttacatggtggctccgggggatgagtttgatgttagcgtaggggttagcaataatctcgaagggttgaacggtaaacctgtggagatcgccgtgcagttgacgccaccgcctcagttggaagtggtgggtaaggccgagcaaagcctgtcattggcagagaagcgtgaaggcgtgatcaacttccgcctacgtgccaaggcggcactgggtgatgctccgctggtatttgatgcacgttatggtgataaaaccagccgccgtaccattagcacctcggtacgtccggcaatgccttaccgcacccagacggtgatgggccggatgagtggcagcagccagaatattgataatctgcggcagatgtttgatgcctatgcgcagcgtagcgcggcggtatcccactcgccgttggtgctgaccaacggtctggcgcagtatctggcagattatccgtattactgttctgagcagatcgtcagccgttctattccgctgatcatgcaaagccagcatccggaaatgaaaagcagcctgagccaggccgaagtcagcaaacagctgaaaaacctgctcggcgtactgcgttcccgccagaacgacagcggggccattggtgcctggcgttcatcgccggaaaccgatcctttcgtcacgccatacgtggtgcaatacctgctggaagccaaagcggcgggctatgccttgccggtagggatgctggaagatgccaacggcgcgctgcgtgagctggcagccaaccgttatgatgatatgtatcatctgcgtctgcgtacctgggcggtctacctgctgaccttgcagggcgaaattaccaccaactcgctggcctcggtgcaggatacgttgcagaaactgtatccagacagctggaaaaccgatttgagcgccctgtatctggcatcgtcttaccgtctgctgaaaatggacgatgaggccaatgccttgctgcagcctagctggaagcaactgagcaaagcctatgacaaaggctggtggacgcagaattacttcgatccgctggtgcaggacgcaacgcgtctgtacctgatcgctcgccacttcccggagaaggtttcttccatccctccgcaggtgctggagaacatggtcaaggcgttgaaagaagagcgctacaccacttactcttcggcgatgagtatcctggcgctggaaagctactcggctcaggtggcggcgcaggccaatgccacagattcgctgacgattgcgcagctcggcaagcaaggtaacgtcgatccgcaggtgatttcagagatgatagggctgtttgccaaaggccagtttacggccgaggccaaagccatccgctttaccaacagtgccgacgctccggcctggtatgtggtcactcaggccggttacgatctggctgctccacagaaagccattgctcgcggtttggaaattacccgtgattacaccgatgaacagggtaaacctgtcactcaggtgacgctggggcagaagatcaacgttcatctgaaaatccgcgccaattcgaaagaagggcagagcaacctggcgattgtcgatctgctgcctggtggatttgaagtggtgcagcaaacggcaccagagccagaatcgaccggcgaagacggtgaagccagcgagaatacggacgcagggtggcagtcgccactggctgcctcgggctccacttgggcacctgattacagcgatatccgcgaagaccgggtgattatctatggtagcgccagtaccgacgtgcaggagtttgtctaccagattaaagcgaccaacaccggtagctttgtgatccctcctgcttatggtgaagccatgtacgatcgtgaagtgcaggccatgtcggccagcagcggtaaactggtggttgtaccggcggaaagtcaataagccatcacgatgccccgcagcggtgggctgcggggttcgtgggtatcgagactccatgaaaatccttcctgcatctgctgtggcaaaacgctggctgcaaaatatcttgatggcagtatttctgctggcgctgggcctggtaggggcgcggctgtggccgcatcctccgctttcgcagggcgtgcccttttccacggtttattacgatcgccacgggacgctgatgcgcctcacgttggccaatgacgatcgctatcgcctatggacgccgttggaaaagatctcgccgctggcggtgcagggtattttgctgcatgaagatcgctggttctattacaaccccggatttaaccccgtcagcctgctgcgtggtttttggcgcagctacgtagccggtggcaaaatgcagggcggttcgaccatcaccatgcagctggcgcgcatgcattggcatctaaatacccgcacacctggcggcaaactgatgcaggtactgcgggccgttcagttggaactcagctactccaagcacgatattctggaagcctatctcaattacgccccctatggccgcaatattgaaagcatcggtgcggccagcctgatctattttgccaaggcaccgcaggatctgaccttgccggaggcgctgacgctctcggtgttgccacagtcccccagctatcgcatcgaccctaaaaccggcgtgttggggcaagctctgacgcaggcccgtaaccgcctgtttcaacgctggcagagcgtgtatagcaccgacagcagccagcgagccttgtttcaactccctttggcactgcgccagccagaacggatgccgtacattgctccacactttatcgaacagttacgccaacagacccagcagttagtgcagctggatacccgtgtggatactacgttggatgccgggctacagcggttgatcgaaaagcaggtgaatgcgtttatcgtccgaaaccagagccgggggatccataatgcctcggtgctgttggtggacagccgtgatatggggataagggcgttagtgggctctgctgattattacaaccgcgagatccaggggcaggttaacgggaccaatgccaaacgctcacctggctcgaccctcaagccctttatttatgccttggggatggagcaaggggtgctgcatccgatgaccatcttgaaggacgtgccttcgtcttttggcgcctatgcgccagaaaactttgaccgacgtttcctcgggccggtaacggcgacagacgcgttgaacttcagccgtaatattcctgcggtgtatgtggcttcgcagctacggcagccgacgttttatcagtttttaagcctttccggcatcgccaatctggccagtgagaatcattatgggctgtcgctggtgttgggcgggggggaaatcactgcccaggaactggcgaagctgtatgcgctgttggctaaccggggcgtattacgtccattgaggatgcaaaagaatgacgcctatccaccaccgatccgtttgctcagtgaagaagccagctttactacgctggatatgctgcgccagcatcgtcggccaggtgacactttggcacaacgttcgtcatccctgccggtctattggaaaaccgggacttcctggggcttccgcgacgcttggagcgtcgggatttttgggccttacgtactggtggtgtgggaagggaatttcgacagcagaggcaacaacgtgtttgtgggggccgatgcggcagctccgctatttttcaatattatcgacagcattaacgccagctatccggccttgcaggagccgaaacaccccttcccgaaacagttgaagcgggtggatatctgcctggccagcggtaacttaccaactcagtggtgccagcagaaaggcaaaacctggtttatccccggcaagtcgccgatcaaggtcgataccgtctatcgtccggtggtgctggatattcacagcggtgaggtggcctgcccgccatatgatgaaacgcaaacccgcaccgaagtgtttgagttctggccttccgatttggctaacgtgtttgctcaggctggattacccaaacgggctccgccgctaaaccattgcaaggataatgcggtggcgatcggtggcagcccgccgcgcattacctcgccgctgaaaaataccacctataccttgcggcaatcgcagcaggggcgtgacaaaatctccttcaatgcggtgacggatgcggacagtaaaacggtgtattggtttgtcgatgatatttatcttggcagcagcgccagtaaaaccgccatcgattggcggccggtcaacaatggccagtatcgcatccgggcggtggacgatcatggccgggccgatagccgcctgatcaccattgagctggtgaactaagatgccccctcaccctaaccctctcccagagggagagggaaccgaacgagtgtgtttgaaattgtagtgagtcaccttggaagtgggggctctagcttgctgagattacctttacctccaaaagagcagggcctaccagttccctattcctgcgaaagaggtgtggggagagggggcgtaaatgcccgctttctgcgccatcgtctgcaaatgaccaaaaacattaccaacgcgtaagccgttatgctcatactcgttggtgatccacggcgtcaaattacccacctgttgcgccgtcgccagcgagagcttcaaatcgacatacatatcgctgaaataaatggcggcgaataccggtacccgattgtcgagcaggcgatcgctgttatacaacggtgaccacacgcggcgatcggccagcagcttggcgggttcattgaaggggcgcagagcggcgatctcggtgaacatccagggatagatcatttccccggtcaggtaaagcggccgccgatcctcggcgaaagcatcgaagttgccccgttgccgctcggcggcccagttggtagccttatcctgcgcgtaaatactttcatgcagcgcggcaaacagcggattctccgcgtagctggtcaacgccatcacctgcgacaggaaggtatcgctgaattcaccgtctgggttgaaggcctcgtcaaacagccaaagtagccgctcgtaaccttcactcatgccaagatcgatccccaggctttgcaggcggcgtacggtcagccggtcgccatcgggcaacaacacctcttcctgctccagcttgtcggcaatctggccaagcagcggctccagatgtgggtaacgctgatagaagatgcgatttttggcgatcacctgcggataggtatgagcgtagacttcatcggcatcgggctgcaggcttgccaggccgccggtcataaagcagcagtgtaggccttccggagcctgagaaagataggtcagcgtgataaagccgccatagctttgcccaagcgtgctccacgggcgatcgccaaagcagtttttacgcagatattcggcatcgctcactatcgagtcggcgcggaagcaggccaggtaatctgctgcctggtgggcggttagcccggccagacttttaccttcaattcggctgctgcgcccggtgccacgctgatcgagcaggatcacccgataacttttgagggcttcggcaatccaactgctgcgtgccgtagggcgtgggcttttccctccagggccaccttgtaaaaacagcaggcaagggagttgctcatcacggcgtaacgggtcaaccaactcacgggcaaagatctcaatggtgcgggtatccttgctatcgaaccaattcagcgggacttggaccaggtgttcacgtacccagatcgctggcaacaaatattctcgttcaacgctcatgtttttctctccctgttatggtgttctcttttttctgccggttattttaatgccatatcggtgtttatctggagcgttcagatctactccattttatcgataagcaagaatggtccggagtttgaagagtgaacatcagcgtaacaggcggaaggaacttagcaaatgcactgatgattaaattttagtcaatacgtgtgagggtgtgactgaataagtattcttatttgagaataaaaaggggggactggtggcagggcggagccaccagtcaacatcggtcgggctcagccgttatcgatgacgtcggcagcaaggaattcaaaaggagggctggttttaaactcagcggaaacctcaccggtaaaatctgccatctcatctttacccagcgccagctttttaaccggagcgccagcagcaaagtcgacctgtttaaggtctacccaaaatgtactgctgcccagtgctgattcaaagtagtacagcttgttcttttgatcggccagggtgcgccaacgagtggaagaaatattgggttcttcaggggtcgtgatgccaaagggcacagaaacattgcgcataacgctcagtacgctagaggctgccagcctggcctgatgatatttcgggatagcgttgatataaaactgtgcgcgtacaaaacggtcggcagcacggtttgtgccaggcagcatgacgttacccccaatcccttgccagtacttggtgatggccaactgttgatcgaaggtaggggaattggtcaggacctgatagtcgcggctatggtgaatcactaatttgccgttaatatattcaaaaatagcgctgtctccactggcatcggacaacgacaaatgaagggaggccaaacgttcctggccaggcacgccgccggtcactacgataaagggggacttttccagtgagttaacggcttcttgcaccgtggcgaaattatccaatgcatactgtgcccatgctgccaatgataaggttggctgctggccatcgaatgccgggtattgggattcaaccaaccacagcatattggctaccagacctttttcattcatgccatcggtggttgcaacaccataggcggaagtcacaacgctgccgtatttagacgtccatttgatcgagttgctgcctgcgttaccactgcgctccattccttgaggaaaaatccacaggtcagagtgcagctgttctctccagtccatagttcggccggtgatcaccaggttatcttcgccgtggtagaccgcgcgagtacaggccattgccaactgtggtgaaaacagaatgctgcatatagacagtaaaaggggggctatcaaaagcgttatattccaattcaatgttatctctccttgctactttttgtacagtgtaggcactactgacccgtggggcaaaaacgagagcgccaaacgggattttcgtttcgtcattatttatgtttgacgatagaatcaatcaattacctctttcctcgccctgaaaaccggccagcaggctgcagcttgcagggtcaaggagataaaatgcatgattaatctatggaaaaaatcactctatgaaggtgttgtaccaggacgaacatctgatcgccgttaacaaaccctcaggttggctggtgcatcgtagctggctggatcgtcacgagacaaagtttgtgatgcaaaccgtgcgcgatcagattggccagcacgtatttaccgtacaccgtctggatcgtcctacttccggcgtattgctgatggcgttgtccagcgatgtagctcgattattgtcgcaacagtttgaactgcatcaggtacagaaaacctatcacgcggtggtgcggggctatgttttagagggcggcaccgttgactatgcgctgactgaagagctggataagttggcggataaacatgccaatccggacaaaggtccaaaaccggcggtaagtcattatcagcccttggcaacggtagagatgccagtggcgattggccgctatgacacctcgcgctatagcctggttgagctgaaaccagagaccgggcgtaagcatcagctgcgccgtcatatggtgcacctgcgccatccgattattggtgataccgctcacggcgatctgcggcaaaaccgtggtatggccgaacactttggttgttcgcgcctgatgttgcacgccagccatcttcaacttactcatccggtgagtggccagccgttgcatatttccgcgccctgggaagcagattggcaaggtgtcatgtcacaatttggctggcataacgtgctgccagaacttgagtttccgcaggctaacggtcaggatagctaatcattttttaacggttataagggagcagcaacgatggctcaggtcggcattttcgtcggaacggtctacggtaactctttgttagtagcggaagaggcagaaaatatcctgcaacaacagggccatgaggtcaaagtgtttgaagaagggacgctggcagagtggcagttttaccgccagcattatgcgctggtcgtgacttccaccaccgggcaaggggacttgcctgacagtattgcgccgctgttccaggctattcgcgaccaggtgggctatcagccggagctgcgttatggcttgattgctctgggcgatagcagctatgacaacttctgcggtgccgggcgtacctttgatgccttgctgcaagagcagggggcaacgcgcgtaggtgaagtgctggagatcgatgcgatcgagcaacccgaaccggaagtggtttcctgcccgtgggtagagcagtggggcaccttgttgaaatagcctctcgatgcctggttacgagcggccaggcacgactttatttctgctatctcctgtggtgaagataaagcaaaaaaaaacctaatcccttaagcactcaaggccgcagccatcaagcgttaaagaattaggttttgcctgccgaagcagtaacaaccctatcgattaccgatttaccctatcacacagaaaaccggcaaaatgtgaacccgctggcacacaggcgatcaaattatcgccaagggttgcggttatttaccgcgcgtcagtttttccagatcggattcgatctcggcaattttgttggtgaccacgttttgcagatgctgcaggtcatcgaggatcttgcgtttcagatctacttctacctgatcgcgctggcagagttgatccagttcatcgatcacgtagcgcaggttcgggttgatctcatggatctctttgtaaccctggccggcattgtctgccaccacggttttgcgctggcgcggatacttgaacttcacgctcttggcaaagaactcgcccttatctttgcggaagtaaatcttgaggatgtcgttattggcctcctgacgcaggctatagcgatcgatatcttccggttgattgatacccaagcttttcaggttgtcatacataatagcgccaccttttaatcaactatattcccctgaacgcgcaatatgcagttttgtaagctgcaaatcgaaacacatcaggaatattccactgccagagagtatggcgaaaacgcccgtcacagactgtgacggcccgcgtattgaaggcaaaaaaatggcgggtgatacacccgccgttcaagcttagtcgatagtgcgcaataactcattaatcccgactttaccacgggtcttggcgtccactttcttgacgatcactgcgcaatacaggctgtaggaaccatctttggaaggcaggttgccggacacgaccacggagcctgcaggtacgcggccatagtgcacttcaccggtttcacgatcgtagatacgggtgctttggcccagataaacgcccatggagatcactgaaccttcttctacgatcacaccttcaaccacttctgaacgcgcgccgataaagcagttgtcttcgatgatagttgggttggcctgtaatggctccagcacgccaccgatgccgacgccgccggacaggtgaacgtttttgccgatctgcgcacaagagcctacggtggcccaggtgtctaccatggtgccttcgtcgacgtaggcaccgatgttgacgtaagaaggcatcagcacggtgttacgagcgataaatgccccctgacgtacggtagccggtggcaccacgcggaagccttccttctggaagcgtgcttcatcgtagtcagcgaatttcatcggcactttgtcgtaatagcgggtttctgcaccgtccattaccttgttgtcgttgatacggaaagacagcaggacggcttttttcagccactgatgggtaacccattgcccctcgatcttctcggcaacgcgcagggcgccgctgtccagcagggcgatcacctggtttaccgcttcacgcgttacggtgtctacgttggccggggtaatatccgcgcggcgttcgaaggcgctttcaataacgttctgtaattgctgcatgctgttctctgtcctgattttatttacgaaaggttacttttatcacattttatcggttggattgagtgcctctgtcaaccgttgttctaattttctgcgtgtttgcggatccagcgcccggcgatcggcatcggccaaaataaacaaatcttcgacccgttcgccgatggtggagatacgtgcaccgtgcagcgacaggcccagatcggcgaaaacttcacccacacgcgccagcaggccgggctgatcgagggcgatcagttccagataactgcggcgatcggtgtgggttggcaggaagctgacctcggtcggtacgctgaaatggcgtagcttggacgacggacgccgagcgcggggcggttggtaatctcgttgggtgatggcttgctccagcgcatggcggatcgcggcatgacgatcctgggccaacgggctgccatccggctccagcacgataaaggtgtccatggccatgccgtcgcggttggtgaagatctgggcatcatgtacgctgagattgcgccgatccagctcaccggcaacggcggcgaacaggtaagggcgatccgggctccagataaagatctcggtgccgccgcgcgtggcctggtggctgaccagcaccaatggcttggttgagtcatgggccagcaggtgacgggcgtgccaggcgagctgattcggcgaatggcgcaggaaatagtcggcgcggcaacggctccagatatggtgcagcgcctcttcatcgatattgtccatgcgcaacagggccagcgcctgtaaacgatggtggcgcacccgctcacgcagatccgggctgttctgcataccacggcgcagttgcttctcggtggcgaaatacagctcgcgcaacaggctctgtttccaactgttccacaaggtctcgttggtggcacagatatcggcgaccgtcaggcaaaccaggtagcgtagccgggtttcactttgcacttcgctgctgaactgctggatcacggtcgggtcctgaatatcacgccgttgtgcggtaaccgacatcagcaggtggcagcgtaccagccaggcaaccagctgtgcttcgcgtgagttcaagccatgcaatgcagcaaactccagggcgtcttgggcgcctaaaatggagtgatcgcccccgcgccctttggcgatatcgtggaacagcgctgccagcaacagcaattccgggtgaggcaggcgaggataaagctctacgcacagcggatggcgtgggcgtgtttcctcatcggagaagctttccagcttttgcagcacgcgcacggtatgttcatcgacggtataggcatggaacaggtcgaactgcatctggccgacgatgctgccccattgcggcatataggcccacagcacgctgtggcgatgcattggcaccaacgcccgtgagaccgcgccagggtgtcgtagaatggccataaacagctctctcgcctcgggaatgttgcacagcggctgtttcaggtggcggcgggcatggcgcaactggcgtacggtggtggagtagatgcctttgatttcgcggttgcgtaccatcaggtagaacatgcgcatgatggcttcgggctggcggataaacagcgtttcgtcgcgcagatcgatcaaattgccacgcagttgaaaatcatcgttcagcgggcgcggcttctccgtggcgtccaatgccaggatcgcttcatcgaacagctgtagcagcatgtggttcagctcgccgacgcggcgcgtcatgcgatagaaatccttcatcatgtgctctaccggctcattgccttccccctgatagcgcagcagttgggccacgctgagctggcgatcgaacagcaggcggttgtcataacgcggtagcgccaggtgcagggcaaaacgaatacgccacaggaagctttggcattcgttcaattcgttgcgttcggcctgggtcaggaagccaaaaccgaccatctcatcaagcgaggtggcgccgaaatggcggcgggccacccacatcagcgtatggatatcacgcaggccacctgggctgctcttgatatccggttccaggttgtagctggtgccgtgatagcgctggtgacgttgttgttgctcaaccagtttggcgtcaaagaatttgggcgaaggccagaagccatcgctgaaaatatgcttctgcaattgcaggaacagggcgacgtcaccgcagatcatgcgggattcgatcaggttggtggcaacggtcaggtccgccaagccttccagcaggcactcttccagcgtgcgtacgctgtggccgacttccagcttgagatcccacagcagggtaatgaattcaccgacgcgagcggcctgttcatcgttcaggcgagtctggctgagcaccagcacgtcgatatcagacagcgggtgcagttcaccacggccatagccgccgacggccagcagcgccgtttcggggatagtgtcaaagccgtaaaacagccacagccgccgcaatagccgatcgataaacttgctgcgcgccgccaccaggctttcggcactggctccggcattgaaggctactgccagccactgctgaaactgctcaagccgctgtttaagagccaggcaattgatctcttcatcgccataggtgctgggagcatccggctttttgggaacggccggggtctctagctcacgataattttcagacatgtttcgccgcccataaaaaaagccggcataggccggcttgtcacaagaaccctgtggttcttacatttcgtgcgtaatgatgttggggatggtgtcatccttgcgcaacgtcattatctcgcagccgttatcagtcaccacaatagtatgctcatactgtgccgacaagctgcgatctttggttttcaccgtccagccgtctttcatggtacggatgcggtaatcaccggcattgaccatgggttcaatggtgaaggccataccggccttcagcaccacgccgccgtcatcggcatcgtaatgcagtacctgaggctcttcgtggaaaccttcgccgataccgtggccgcaatattcgcgcactacggagaacttctctgcttcaacaaactgctggatggctttacccagagtgcgcaggcggatacccggtttgaccatcttcaaggccagatacaggctttcctgggtgatgcggcacaggcgctcgcccagaatggtcggtttaccgacgatgaacatcttggaggtatcgccgtggaagccgtctttgatcacggtcacgtcgatattgacgatatccccgtctttcagcaccttgtcgtcacttgggatgccgtggcacaccacttcattcaccgagatacagaccgattttgggaagccatggtagcccaggcaggccgagattgcctgttgtgtattggtgatatgctcgtggcagatcctgtccagctcgccggtggtgacgccgggtttaacgtggggctcgatgatttccagcacttctgcggccaggcggcccgcaacgcgcatcttttgaatgtcatcaggtgttttaattgaaattgccatgaaagttagtccgcaggtgtcgttatggtcgacaaggtagaaagataaggcattgagttatggtatcagcccggcttgaggctgccaaatttcatttgtgaagggccaggccaactgcaacaaaagttggtgtctggggcgggtttatggtataaagcgcgccggcagatccgcattcggccttgagtgccagtgaggaaatgaccgaaagtagttcaactgcactcacattgtgtaaataacacacacgtatcgacacatccgccggggtgccttgagatgactcacgtcattgtccgggtcggcgttatgggatacgtggaggcataaccccaatcaactctaatagaggttttaatcatggcaactgtttccatgcgcgacatgctccaggctggtgtacactttggtcaccagacccgttactggaacccgaaaatgaagcctttcatcttcggcgcacgtaacaaggttcacatcatcaacctggaaaaaaccgtaccaatggccaacctggctttggctgaactgaccaagatctcttcccgtaaaggtaagatcctgttcgttggtaccaagcgcgcagcaagcgaagcggtaaaagaatatgctaacggctgcgatcagttcttcgtgaaccatcgctggttgggcggcatgctgactaactggaaaaccgttcgtcagtcaatcaaacgtttgaaagatctggaaatccagtcccaagacggcaccttcgacaagctgaccaagaaagaagcgctgatgcgcactcgtgaactggccaagctggaaaactccctgggtggtatcaaggacatgggtggtctgccagacgctctgtttgttatcgatgccgatcacgaacacatcgcgatcaaagaagccaacaacctgggtatcccggtattctctatcgttgataccaactccgatccagacggcgttgacttcatcatccctggtaacgacgacgcaatccgtgcaatcaaattgtacctgaccgccgtttctgccgccatccgtgaaggtcgttctcaagatctggccgttcaggcggaagaaagcttcgtagaagctgaataataaggtcaagcccttattaaccaggtattgaatatgttggttaggggggcctttaagggccccctttgcttatctgaatgagaactatctccgagcgagataaccgaggaaaaagaaatggctgatattaccgctgccctggtaaaagaactgcgtgagcgtaccagcgcaggtatgatggattgcaaaaaagcgctgatcgaatctaacggcgacatcgagctggcaatcgaaaacatgcgtaaatctggcgcgatcaaagcggcgaaaaaagcaggcaacgtagctgctgacggcgtgatcaaaaccaagatcgaaggcaacttcggcatgatcgtggaagttaactgccagaccgacttcgttgctaaagacggcggtttccaggctttcgctgacaaagtgttggatgcggcttttgctggcaaaatcactgacgttgatgtgctgaaagcgcagttcgaagaagagcgcgttgcgctggtggcaaaaatcggtgagaacatcaacattcgccgcattgctgccctggaaggcgacgtgttgggtagctacctgcacggtgctcgcatcggtgttctggttgccgctaccaaaggcgcggatgaagagctggttaagcagctggcaatgcacgttgccgctagcaagcctgaattcgtcaagcctgaagatgtgtctgctgaagtggtagagaaagagtaccaggttcagttggacatcgccatgcagtctggcaagccgaaagaaatcgcagagaagatggttgaaggccgcatgaagaaattcaccggcgaagtctctctgaccggtcagcctttcgtgatcgaaccaagcaagagcgttgctcaggtgctgaaagagcacaacactgacgtgaccaatttcatccgctttgaagtgggtgaaggcattgagaaagttgaagctgactttgctgctgaagttgcagcaatgagcaaacagtcttaatgctgttaatggagccgccgcgaggcggctccattttatccagccagagaaatgccgatggtgggccccgcgtgcccaggctaatcggttgaaaaccccaatactataactactgcttcttaggacagaacaccatggcaaccaatgcaaaacccgtttatcagcgtatcctgctcaaactgagtggtgaagccctgcaaggtgcagaaggctttgggatcgacgctagcgttttggatcgcatggctcaggaagtaaaagagctggtcgagctgggcatccaggtcggtgtagttattggcggtggcaatcttttccgtggggcaggtctggcacaagccggcatgaaccgcgtagtgggcgaccacatgggaatgctggctaccgtgatgaacggcctggctatgcgtgatgcactgcaccgtgcctatgtgaacgcccgcctgatgtctgccattccgttgaatggcgtatgtgacaactacagctgggcagaggcgatcagcctgctgcgtaacaaccgcgtggtcattttctccgccggtacgggtaacccgttctttaccacggattctgcggcctgcctgcgcggcatcgaaattgaagccgatgtggtattgaaagcgactaaagtggatggtgtatactccgctgacccggtgaaaaacccggacgcaacgctgtacgaacagatcacctaccaggacgtgttggagcgtgagttaaaagtgatggatctggcggcgtttacgctggctcgcgaccatggcttgccgatccgcgtattcaacatgaacaagccgggcgcactgcgtcgcgtggtgatgggtgagaacgaaggtactctgatcaccaaataacggctgtttggccaaatttcccaggagcgggtaacgccaggcgttgtgtgcttctgataagtaaaattcacgggctatacttttcagtacagcctgccaagtaaccagcttccaagggttcgcaacgtgattaatgaaatcagaaaagatgctgattcacgcatggaaaaaagcgtcgaagcattcaaaaaccaaatcagcaagatccgtactggccgtgcttctccaagcatcctggacggcatcatggtggaatactacggtgcagcaacgccgctgcgccaactggccaacgtcacggtagaagattcccgtacgctggcgatcaacctgtttgaccgttctctggggtcggcggtagaaaaagccattatgtcttccgatctgggccttaacccaagctcggctggcaccgtgatccgcgttccgcttcctccgctgacggaagagcgccgtaaggatctgatcaaggtcgtacgtggcgaagccgagcagggccgtgtggccgtgcgtaacgtgcgccgcgatgccaacgataaagtgaaggcgctgctgaaagacaaagaaatcagcgaagatgaagatcgccgttcacaagacgacatccagaaaatgaccgatgcctacatcaaactgcttgatgcggcattggccgataaagaaaaagaactgatggatttctaatctccatcgccttgaaatagagcgtcgccttggcggcgctttattttttgtggtgcagatctcgttttatcgtacgcacagagcgtaaaccagctgtgatgcaagttacactgtggtgtacctccgatctcatcacgcagtagattcagagcgatctcatgaagcaactgacaattctgggttccaccggttccgtgggcaccagcaccctggctgtggtcagggaaaatcccgaccttttcgcaatcaaggcactggtagctggccgtaatgtggcggtcatggcgcagcagtgcatagagttccgcccgagctatgcggcaatggccgatgagctggccgccaatgagttacgcgccgtactggcagaaaacggtgtgaaaaccgaagtgctggcaggtgaaaaggcagcctgcgagctggccgcattagacgacgtcgatcaggtaacggccgccattgttggggccgctgggctgttgcccactctggccgcgatccgagccggtaagcaggtgctgctggcgaacaaagagtcgctggtcacctgtggccgcctgtttatggacgcggtgcaaaagagcaaggcccaactgctgccgctggacagcgagcacaacgctatcttccagagtctgccagaaagcatccaacgccaactgggttatagctcgctggaagcccacggcgtttcgcgcatcgtgctgaccggttccggtggcccgttccgtactacgccgatggaacagttcgccaccatgacgccggatcaggcctgtgcgcatcccaactggtcgatggggcgcaaaatctcggtagattccgccaccatgatgaacaaggggctggagtatatcgaagctcgctggttgttcaacgcctcggcagagcagatggaagtgatcctccacccgcagtcggtgatccactccatggtgcgctatgccgatggtagcgtgctggcccaactgggtacgccggatatgcgcacgcctatcgctcatgccatggcttatccgcagagggtccactccggggtggcagcgctcgatttctgccgtatcggggcgctgaccttctctgagccggaacgtgagcgctatccttgcctgtatttggcaatcgaagccttcgatgcaggccaggcggcgaccaccgccctcaacgcggccaatgagattgccgtagcggcatttttgcagcaacaaattcgtttcactgatatttcagtcgtgaaccaaaaggttgttgaatgtatggcgctgccggaacccaccagcattgagatggtgctggagatcgatcgtcaggcgcgtgaggtggctggcggtttggttcgtaacctgcgagtttaatcacttgagcgggttataccgcgggtaaattcggctctgctacattgtctgaatttgctggtaaactcgccaggccgccgtgtggccgtttgttcaggcttcacggaggtgttatagtctgcgccataatcaccggttataccgttgaataatggccggattggcagacctttttacctgacaagcgcggccaatagggcagtgccaagccagaagacggggaaaatttacgccaatctttgccgggcgctccttggggcaccaggcaggcagactgaaaagctgtgtcaggcacacggctttttttgcgcgtaaggtccgatattccggcaaggccagggcgtttctaccgaggaaataagtacgagttatgtcgtccgcaaaccaacaagaagctaatctttctgctcatgggccacgtcatgtcgcgatcattatggacggcaatgggcgttgggctaaacgccagggcaagttacgtatcttcggtcataaagcaggggtgaaatcggtacgccgtgcggtcagttttgccgccagtcaccatttagatgcactcacgctttatgccttcagcagcgaaaactggaaccgcccggcgcaggaagtctccgcgctgatggagctttttgtccgcgcactggacagcgaagtaaaaagcctgcataaacataatgtcaggttgcgtgtgatcggcgatgtcagccggttcagcgcacgtttgcaagagcgtatccgccgctcggagcaactgacagaaaataacgatggcctgacgcttaacgttgccgccaattacggtggccgttgggatattattcagggagtgaaggatctggccgagcaagtacagcaaggtacgctgtgcgtagatcagatcagcgaagagttactgggcgagcgcgtctgcatgagcgatctgtctccggtggatctggtgatccgtaccggcggcgaacatcgcatcagtaactttttgttgtggcaaattgcttacgccgagctttactttactgatgtactctggccagattttgatgaacttgtctttgaaggtgcgctgaatgcatttgcacaacgcgagcgtcgcttcggaggaacaacacctatcgatgccaatgcgtcctagggggaacttttgctgaagtctcgcatcataacggctctgattttaattccgattgttatcgcagcgctgttcttgctgccgccgatgggctttgccctggtaacactcgctgtgtgcatgttagccgcctgggaatgggggcagttggctggctttgctgcccgcccccagcgtatctggctggcgatattatgcggtttcctattgacgctgatgatgctcagcgtgcctgcctaccatcaatctgttcaccaattgcagatcgctggcccgctatggctgtcgctgggatggtggctggtggccctgctgctggtgctgttctatccaggctcggctgcgctgtggcgtaattcgcgcaccttacggctggtctttggcctgttgaccatcgtgccgtttttctggggcatgctggcgctgcgtcagttcggctatgaagagaatcattttaccggtgcatggtggttgctgtacgttatgctgctggtctggggcgcagattccggtgcctacatgttcggcaagctgtttggcaaacacaagctggcaccgaaggtctctccggggaaaacctgggaagggctggtcggtgggctggtaacgtctgccgtgatttcgtggctgtttggccgctatgcgccgttgaacgtggtacccatgaccctattggtctgttcggtgattgctgctctggcttcggtgttgggcgatctgacggaaagcatgtttaaacgtgaagccggtatcaaggacagtggtcatttgatcccggggcacggcggcattctggatcgtatcgatagcctgaccgcagcggtaccggtatttgcctgcttgatgctgttagtgttttaatccgttatcggcggggggagtaaagggattctatggtcagcgtactctggaacttggtcgcgtttattatcgctctgggtatattgatcaccgtgcatgagttcgggcacttttgggtggctcgccgctgtggcgtccgtgtggagcgtttctctatcggctttggccgtgcgctatggcgccgcaccgatcgccagggcaccgaatatgtcgtcgccatgatcccccttggcggctatgtcaaaatgctcgatgagcgcgtcgaaacggtggctcccgagctgcgtcatgaggcgttcaacaataaaaccgtctggcagcgcgcggcgattgtcagcgcgggccccattgccaatttcctgtttgccattcttgcctattggatcgtctttatcatcggcgtaccgagttaccgcccggtcatcggtgaaattactccgcaatccattgccgcccaggccgaaatttctccgggaatggaacttaagtccgttgacggtatcgaaacgcctgattgggaatctgttcgcctggcgttggtgaccaaaatcggtgatgcgcaaaccgaggtagaaattgctccgtttggttcttcacaaaagctgagcaagaccctggatttgcgccactggagctttgagccggacaaagaagatcccgtgcgttctctaggcatgatcccgcgtggcccgcagattgaatccgtgctggcagaagtccaggccgggtcagccgcgcaaaaggcaggtttacaagcgggggacaggatcgttaaagtcgatggtcagccacttggccgttgggttacgttggttaaacgtatccacaatgctccagggcttccgctggttttagagatagaaagaaacggcgcccccttgtctttaacgctgataccagatacaaagccggtgggaaaagacaaagcggtggggtttgccgggattgtacctaaagttatccctctgccggatgagtacaagaccattcgtcaatatgggccgttctctgcgctgtatcaggcgggggacaaaacctggcagctgatgcatcttacggtcagcatgataggtaaattaattaccggtgatgtgaagctgaacaacctgagtggcccgatttccattgcacagggagcaggggcatcagcagaggtgggttttgtgtattatatgatgtttctggcgttgattagcgtcaacttagggatcatcaacctcttcccattaccggtattagatggtgggcatctcctcttcctggcgatagaaaagctgaagggggggccagtttctgagcgagtacaggactacagctaccgcattggttcgatcttgttggtactgctgatgggtcttgcacttttcaatgatttttctcgtctttaggggcggggacaggttaggaagaacgcataacaacgatggcgatgaaaaagttgctcatagcgtcgctgctgtttggcagcgccaccgtatacggtgcagacgggttcgtagtgaaggatattcatttcgaaggcctgcaacgagtcgccgtcggtgcggcgttactcaacatgccggttcgcgtaggcgataccgtctctgatgatgatatcggtaacaccatccgtgccttgtttgccactggcaacttcgaggacgttcgcgtactgcgcgatggtgatacgctgattgttcaggttaaggaacgccctaccattgccagcatcactttctccggtaacaaatcggtgaaagatgacatgctcaagcaaaacctggaagcctctggcgtccgggttggtgaagcactcgaccgcaccaccttatccagcattgaaaaagggttggaagacttctactacagcgtcggtaaatacagtgcctcggtgaaagccgttgtcacgccgttgccgcgcaaccgtgttgacctgaagctggtgttcacggaaggggtttccgccaagattcaacaaatcaacattgtcggcaaccatgccttcaccaacgatgagctgatcgcacacttccagttgcgtgatgatgtgccgtggtggaacgtagtggccgatcgcaaataccagaagcaaaagttggcgggggaccttgagagcctgcgcagcttctatctggatcgcggctatgcccgtttcaatattgattcgacgcaggtcagcctgacgccagataaaaaaggcatctatatcaccgttaacatcaccgaaggcgatcagtacaagctttctggcgtggtggtaaatggcaaccttgccggtcattcggcagaagtggctcagttgaccaagattgagccgggtgagctgtttaacggcaccaaagtgaccaaaatggaagataacatcaagaagatgtttggccgttatggttacgcttatcctcgcgtacagactcagcctgaaatcaacgacacggataaaaccgtgaagttgaacgtcagcatcgacgcgggtaaccgtttctatgtgcgtcgcatcaagttcgaaggcaacgacaccagtaaagattccgttctgcgccgcgaaatgcgccagatggaaggggcgtggctgggtaacgatcaggtcgagcagggtaaagaacgtctgaaccgtctgggttacttcgagacggtcgatgtagaaacccagcgtgtaccgggttcccccgatcaggttgatatcacctataaggtgaaagaacgtaacaccgggacgctgaactttggtgtgggttacggtaccgaaagtggcgtcagcttccaggcgggtgtacagcaggataactggctgggcacgggctactctgttggcatcagcggcaccaagaacgactaccagacctataccgagctgtcggtgaccaacccgtacttcaccgttgacggtgtgagtctgggcggccgtatcttctataacgactttaaagcgaataatgccgatctgtccgactataccaacagcagttatggtatcgacggcacgctaggcttcccgatcaacgagaacaactcgctgcgtgctggcctgggttacgtccataactccctgtcagaaatgcagccgcagatcgccatgtggcgctatctgaactcgatgggcgattatcctgactttaaggatcgcgccagctttacagccgatgacttcacgctgaacctgggctggacctataataatctggaccgtggctacttccctacccagggtaaccgcactacgttcaacaccaaggtgaccgtgccgggctccgacaactcatactacaagatgacgttggacaccgcgcagtatatgccgcttaacgatgacaagacctgggtgttgctgggtcgtggccgtctgggctatgccgatgggttgggcggtaaagaaatgccgttctatgaaaacttctatgcgggtggttcaagtaccgtacgtggcttccagtccaacaccattggtccaaaagccgtgtactacaactccaactcgtattcttgccagtacgcgccaggcaccagcaccgctcagcctatttgtagctcgaacgatgcggtgggcggtaacgccatggccgtggcaagcatggagttgatcacgcctacgccgttcctcagcgagaaatacgccaactcggtgcgtacttcactgtttgtcgatgccggtaccgtgtgggatacccactgggaaaacaccgatcagacgctgatgtacggggtaccagactacagcaaggcgagcaacattcgcgtgtctgccggtcttgcgctgcagtggatgtctccactggggccgttggtcttctcctatgcggatccgatcaagaaatacgacggcgacaggtcggagcagttccagtttaacatcggtaaaacctggtaataaccggtttcacctgtgggcatagcggtacaagaatcgcaaatgccaggcttaaaccagctcatagcgagagaaatctcattgtgtaatgtgataagtctggcagattgtgtactttcaaaagtgtcatgtgacacaaatgggtgatggtaaggagtttatagtgaaaaagtggttatgtgccgcaggcctcggtttagcaatggctgcttctgcaggcgttcaggcagctgacaagattgctgttgttaacgtttctagcattttccaacagctgccggctcgtgaaaccgtagccaagcaattggaaggcgaattcaaaggccgtgcaagcgaactccagaacatggaacgcgatctgcaaaccaaaatgcagaagttgcagcgtgatggttctaccatgaaagccagcgatcgcaccaagatggaaaaagatgtgatggctcagcgtgagcagttctctcagaaagcgcaggctttcgagcaggataatcgtcgtcgccagatggaagagcgtaacaagatcctgagccgtattcaggatgctgtgaaagccgttgccagcaaagaaggctatgacgtcgtgatcgacgccaacgcagttgcttacgcaggttcttcaaaagatattactgcagacgtgctgaaacaggttaaataacgccatgccttcaattcgactggctgatttagcgcagcagttggatgcacaattgcacggtgatgacgatctcgtcatcaccggcattgcttctatgcattccgcacagcctggccaaatcacgtttttgtcaaacagccgctaccaagagcagctggcttcctgccaggcgagtgccgtggtactcaccgaagcagacctaccacactgccgtagcgcggcgctggtggttaaaaacccttacctgacctatgcgcgtatggcgcagttgatggacaccacgccagcacccgcagcagatatcgcgccaagcgcggtgatctctccgcaggccaagctggggcagaacgttgctattggggcgaatgcggttatcgaatccggtgttgaactgggcgataacgtggtcatcggcccgggttgctttatcggcaagcaggcacgcatcggcgcaggtacgcgtctgtgggccaacgtaacgatttatcatgaagtggaaatcggccagcactgcctgatccaatcgggaacggtgattggtgcggacggtttcggctacgccaacgagcgtggcaactggatcaagatcccgcagcttggcacggtgattattggcgatcgcgttgagattggtgcctgtaccaccatcgatcgcggcgcgttggataacacccagattgggaatggtgttatcatagataaccagtgtcagattgcacacaacgtggtgattggcgagaataccgccgtcgcgggcggtgtgatcatggcgggtagcctgaaaatcgggcgctattgccaaattggcggcgccagtgtgatcaacggtcacatggagattgctgaccaggtagttgtcaccgggatgggaatggttatgcgaccaatcaccgaacctggggtatactcctctggcattccgttacaacccaacaaagtttggcgtaaaaccgcggcgttggtgatgaatatcgatgagattagcaagcgcttgaaagctgtcgaacgaaaagtcggaaaagactaatcaccacggcccgggatgctgggtataaaacgaaacgcgttggcaatgatgccaaaagcgcaaagagttgttaatttgcggcctgcctgatgatctcctttttggggtcaacgcaggccgtgttgttgatgccatcagtttttagagacaggaagagtattttgactactgacactcatactctagatattgcagaaattctggaactgcttcctcaccgttatccattcttgctggttgaccgtgtattggatttcgaagagcataaatatctgcgtgcagtgaagaacgtatccgttaatgagccgtttttccaggggcatttccctggtaaaccgatttttccaggcgtgctgattttggaagctatggctcaggccacgggtatcctggcattcaagagcgtgggtaaactggaaccgggcgagctgtactatttcgccggtattgacgaagctcgcttcaagcgccctgtggtgcctggcgaccagatgattatggaagtcactttcgaaaaaacccgtcgtggtttgacccgctttaaaggcgtggcgaccgtcgatggaaaaattgtctgcgaagcaaccatgatgtgtgcccgcagccgggaggcataatccgtgattgataaaaccgcctttatccatccaagtgcgatcgttgaagaaggcgccgtcatcggcgctggtgcgcatatcggtcccttctgctacgtcggctcccaggtggaaatcggcgcgggtacggtcctcaaatcgcatgtggtggtgaacggtatcaccaagattggccgcgataacgagatctatcagtttgcctctatcggcgaagtgaatcaggatctgaaatacgctggcgaaccgactcgggttgaagtcggcgatcgtaaccgcattcgcgagagcgtcaccattcatcgcggtactgcacagggaacgggcctgaccaaagtcggtaatgacaacctgctgatggtcaacgtgcacgttgctcatgactgcgtagtgggcaattcctgcgtgttggccaacaacgccacgctggctggtcacgtggagatcgacgatttcgccatcattggcggcatgaccgcgatccaccaattctgtgtgattggtgcccatgtgatggtcggtggttgttccggtgtcgctcaggacgtaccgccttttgtcatcgcgcagggtaaccacgcgacgccatttggcgtgaacgccgttggcctgaaacgccgtggttttgataaggatgaaatgcaggcgatccgcaatgcctacaagatcctctatcgcagcgagaagaccttcgacgaggctaaagcagagatcgaaaccctggcgcaacagcagccagtggtgcagcagttcctcgatttctttgcgcgttctacccgtgggattattcgctgagttatgccaaatcgtccattgactatcggattggtcgccggggaaacctccggtgatattctgggtgccggattaattcgtgcgcttaagacgcactacccaagcgcccgctttgtcggtgttgctggcccgctgatgcaggccgaagggtgtgaaacctggtacgaaatggaagagctggcggtgatgggcgtggtagaggtgcttgagcgtctgccacgcctgttgaagatccgcaaggatctgacccgccggttcagtgagctgaagcctgacgtgtttgtcggtatcgatgcgccagacttcaacctcacgctggaaggccgcctgaaacagcgcggtatccgcactattcactatgtcagcccgtccgtgtgggcctggcgtcagaaacgcgttttcaaaattggtaaggcgaccgatctggtgttggcgttcctccctttcgaaaaagcgttttacgatcgtttcaacgtcccttgccgctttatcggacataccatggccgatgcgatgccattgcaggcggataagctggccgcacgcgctacgctgggcattgacccggccgctcgctgtttggcattgctacccggcagccgtaatgccgaagtggaaatgctcagtggcgacttcctgcgtaccgctcaactgctacgcgagcattatcccgatctggaagtggtggtgcctttggtcaacgccaagcgccgtgagcagtttgagcgtatcaaggcagaggtcgcaccggagctcaaggttcacctgctggatggcaaaggccgtgaggcgatggtggccagcgatgcggctctgttggcttccggcaccgcggcgttagagtgtatgttggcaaaatgcccgatggtggtgggctaccgcatgaagccatttaccttctggctggcggagcggctggtgaaaaccccgtatgtctcattgcctaacctgctggcggggcgtgaaatcgtcaccgaactgctgcaacacgattgtgtaccggataagctggccgcggcgttattgccgttgctggaagacagcccgcaggcggagctgttgaaacagaccttccttgaattgcatcagagtattcgctgtggtgccgatgaacaggccgctcaggctgtgttggagctggcaaaagcatgatggaaccctttgtttaccctgccgcccggctgtttgccggtgtggatgaagtggggcgcgggcctttggtgggtgccgttgtgaccgctgcggtgatcctcgatccggcacggccgattgttggcctggcggattccaaaaagctcagcgagaagcgccgtctggcgttatacgacgagatcgtggaaaaggcgctgtcctggagcctggggcgggctgagccggtcgagatcgaccaactgaatatcctgcatgccaccatgctggcgatgcagcgcgcggtagcgggtttgcatatcgccccggacatggtgttgattgacggcaaccgttgccccaaattgccgatgcgctcgttagcggtggtgaaaggggatagccgagtggcggaaatcagtgccgcatcaattctggcgaaggtgacccgcgatcgcgaaatgaccgagctggatacgattttcccggattacggctttgcccaacacaagggctatcccaccgcgttccatctggaaaagctggccgtgttgggggctaccgagcatcatcgccgcagttttgccccggtaagacgggcgctggagtctggctcgtcagctaagtaaccaagctgcatagttcacacgatgcttaatattacgccccctctccttttgggagagggtcggggtgaggggaaatggctacggtgatcttccccacaccctaatgtaaccctggttcagtttgctgaaccccaacacgttggtatctggatatggccgaacctcgttttattcatctgcgcgtgcacagtgactactccatgattgatggattagccaagattggcccgttggtgaaaagagctgccgcgttagccatgccagccttggccgtcaccgacttcaccaatatgtgtggtctggtgaagttttatggcagtgcgcacggtgccgggatcaaaccgatcatcggtgcggatttccatgtgcaaagcgaagagctgggcgatgagctggcacagcttaccgtgctggcagccgataacgttggctatcaaaacctcacactattaatctccagggcgtatcagcgcggttatggcccggcaggcccggtgatcgatcgcgactggctgatagaacatcgcagtgggttgatcctgctttccggtgcacgtatgggcgatgtcggcaagtttctgctgcgtggcaaccaggccctggtcgatcaatgcctggagttttaccagcagcatttcccggacagctattatctcgaactgatccgcaccggccgtggggatgaagaaaactatctgcacgccgccgtagccctggcgaccgaacgtgggctgccggtagtcgccaccaacgacgtccgtttcctggtggaagatgactttgacgcccatgagatccgcgtagcgatccatgatggcttcacgcttgacgatcccaaacgcccgaaaaactacagcccgcaacagtacatgcgcagcgaagaggagatgtgcgagctgtttgccgacatccctgaagcgttgctaaacagcgtggaaattgccaagcgctgtaacgtcaccatccgtctgggcgaatatttcctgccacagttccccaccggcgatatgaccaccgaagatttcctggtgctcaagtccaaagaggggttggaagaacgcctggagttcctgttcccggatccggaagtccgtgccgagcgccgtcctgaatacgatgagcgtctggatctggaactgaaagtgatcaaccagatgggattcccgggttacttcctgatcgtaatggagttcatccagtggtcgaaagataacgacgtgccggtaggcccgggccgtggctctggtgccggttcgctggtggcctatgcgctgaaaatcaccgatctcgacccgctggaatttgacctgctgttcgaacgcttcctgaacccggaacgtgtctcgatgcccgacttcgacgtcgatttctgcatggaaaaacgcgacctggtcatcgaacacgtggcggacatgtatggccgtgaggcggtatcgcagatcatcaccttcggtaccatggcggcgaaagcggtgatccgcgacgtggggcgcgtgctgggccacccttatggcttcgttgaccgtatctccaagctggtgccgcccgatccgggcatgacgctggaaaaagcctttgctgcagagccgcaactgccggaaatctatgaggcagacgaagaggtcaaagcgctgatcgacatggcacgcaagctggagggcgtgacgcgtaacgccggtaaacacgccgggggcgtggtgattgcgccaaccaagatcaccgactttgccccgctctattgcgatgccgaaggtaaccacccggtcacccagtttgacaagaacgacgtggaatacgctgggctggtcaagttcgacttcctcggtctgcgtactctgaccatcatcgactgggcgttggagatgattaatgcccgtcgtgccaagaccgggttggaaccgatagatatcgcggccattccgctcgatgacaagaaaagcttcgacatgctgcaacgctcggaaaccactgcggtattccagcttgaatcgcgcggcatgaaggatttgatcaaacgtctgaagcccgactgcttcgaagacatgatcgcactggtggcgctgttccgtcccggcccgttacagtccggcatggtagataactttatcgaccgtaagcacgggcgtgaagagatctcctatcctgatatccagtggcagcatgaatcgctgaagccggtgctggagccaacctatggcatcatcctgtatcaggaacaggtgatgcagatcgctcaggtgctggctggctatacgctgggcggggcggacatgctgcgtcgcgccatgggtaaaaagaacccggtcgagatggccaagcagcgcggcggctttgaagatggcgcgaaatcgcgcggtattgacggcgaactgtcggtaaaaatcttcgatctggtagagaagttcgcgggttacggctttaacaaatcgcactccgctgcctatgcattggtgtcttaccagacgctgtggctgaaggcccactatccggccgagtttatggccgcggtcatgaccgccgatatggataacaccgataaggtggtggggctggtggatgagtgctggcgcatgggcctgaaaatcctgccgccggacatcaacagcgggcaatatcacttccacgttaatgacgagggtgagatcgtctatggcatcggtgccatcaagggagtaggggaagggccgatcgaagcgattatcgaagcgcgtaattccggcgagcaggggtatttcaaagatctgttcgacctgtgcgctcgttccgatattaaaaagctcaaccgccgtattctggaaaagctgatcatgtctggggcgttcgatcgcctggggccacaccgtgccgcgttgatgaactccctgggagatgcgcttaaagcggccgatcagcacgccaaagccgaagccatcggccaggcggatatgtttggcgtgttggcggaagcgccggagcaggtggaacaatcttacgccaacgttcccccttggcaggaacaggtggtgctggatggtgaacgggaaacgctggggctgtatcttactggccacccgatcacccagtacctcaaagaaatcgaacgctatgccggtggccagcgtctgaaagatatgcacccgacggatcgcggcaagatgactaccgccgtcgggttggtgattgcttccaagatcatgatgaccaaacgtggcaaccgcatcggtatttgtacgctggatgaccgctctggccgtctggacatcatgttattcaccgatgccttggaaaaataccagcatttgttggaaaaagaccgtatcctgatcgcgactggacaggtcagctttgatgactttaacggcgggcttaaaatgaccgctcgtgaattaatggacatcagtgaagcacgtgaaaaatacgctcgcgggcttgctatctcgctgacggacaggcaaattgatgaccagcttttgaaccgtctccgtcagtctttggaaccccatcgctcggggacgattccagtgcatctctactatcaacgggaagatgcacgggcaagattgcgctttggtgcaacttggcgcgtgacgccgaccgaccgcttgttgatagatttgcggaccttggtaggtaatgagcaggtggaactggaatttgactaaaataggaatgctatgagtctgaattttcttgattttgaacagccgattgcagagctggaagcgaaaattgactcgctgaccgcagtcagccgtcaagacgaaaaattagatattaatctggacgaagaggttcagcgcctgcgtgagaagagcgttgagctgacgcgcaagattttttccgatcttggggcctggcagattgcccaattggcacgccacccgcgccgtccttataccctggattatatcaaacacatctttaccgactttgaagagctggcaggcgatcgcgcctatgccgatgacaaagccattgtcggtggtattgcgcgcctcgatggccgcccggtgatgatcattggtcatcagaaagggcgtgaaaccaaagagaaaatccgccgcaacttcggtatgccggcaccggaaggctatcgcaaagcgctgcgcctgatggaaatggcctcccgcttcaagatgccgctgatcaccttcatcgacaccccaggtgcttatcctggcgtgggcgcggaagagcgtggccaatctgaggcgatcgcccgcaacctgcgtgaaatgtctcgcctgaatatcccggtgatctgcaccgtgatcggcgaaggcggctccggcggggcattggcgattggcgttggcgataaagtgaatatgctgcagtacagcacctattcggtgatctcgccggaaggctgcgcctcgatcctgtggaaaagtgccgataaggcaccgattgccgcagaagcaatgggcatcactgcaccgcgcctgaaagaactgaagctgatcgattctgtgatcccagagcctttgggctctgctcaccgcgacgtaccggcaatggcggcttcgttgaaagcccaactgttggcggacctggcggatctggatggcctgaacaacgaagagttgctcaaccgtcgctatcaacggctgatgaactacggctattgctgagtttgtacgcctgatgactaaccgcctccgggcggtttttttatgcgcgtaagacagcctcggctttttatgttgttataagctattggtagttaactaaaggatagctgcgatgaatatcattgcgatcatgagcccgatgggcgtttattacaaagacgagcctatccgggagcttcacgtggcgctggcctcaatgggcttccaactggtgttcccgaagaacagcggcgatctgctcaagctgatcgaacacaatgcgcgtatctgcggggtggtgttcgactgggacgaatacagcttggagctgtgcagcgaaatcaacgagctgaatgaatacctgccgctgtatgcgtttatcaacactcactccaccttcgatgtccacctgcacgaaatgcgtatggtgctctatttcttcgagtatggtctgaacgctgccgacgatatcgcccagcgcattcgccagtataccgatgagtatatggacaccatcaccccaccgctgaccaaggcgctgttcacctatgtcaaggaggggaaatataccttctgtacgccgggccatatggcaggcaccgcgttccagaaaagcccggtgggctgcctgttctacgatttctttggtgccaacaccctgaaggcggatatttccatctcggtgacggagctcggctcgctgctggaccacaccggcccgcatctggaggcggaagagtatattgcccgcacgttcaacgcggaacagagctatttggtgaccaacggcacttctaccgccaacaagattgtcggcatgtattcggcacctgccggtagcacggtgcttattgaccgtaactgccataagtcgctgtgtcacctgctgatgatgtgtgacatcgtgccgatttatctgcgcccgttgcgaaatgcgtacggtattttaggcggcattccccagcgcgaatttacccgcgacagcattgccgagcgggtggcaagcactgtcaacgccagttggccggtacatgcggtgatcaccaactctacctatgatggcctgttgtataacaccgattatatcaagcaaacgctggacgtggcgtcgatccacttcgattcggcctgggtgccttacaccaatttccacccgatttatgaaggcaaaagcggcatgagtggcgatcgtatcccgggcaaggtgatctatgaaactcaatcaacccacaagctgctggcggcgttctctcaggcttcgatgatccacattaaaggggattatgatgagaacacctttaacgaagcttacatgatgcacaccaccacttcgccgcattatggcattgtggcttcaatggaaaccgctgcggcgatgctacgtggcaatccggggcggcgcatgattaaccgctccgtggagcgagccctgcattttcgccgtgaagtgcaacgcctgcgtgccgagagtgacacctggttcttcgatatctggcagccggaagagattgacgaggcacagtgctggccgttgaatccagacgacaactggcatggctttggtcagaccgacagcgatcatatgtatctggatccgatcaaggtcaccattttgacgccggggatgaacgaactgggtgagctggaggaaagcgggatccctgccgcgctggtagcgaaatacctggatgaacgtgggatcgtggtggagaaaaccgggccgtacaatttgttgttcctgtttagcattggcatcgacaagaccaaggcgatgagcctgctgcgcagcctgacggatttcaaacgtgcttacgatcttaacctgcgggtgaagaacatgctgccggatctgtatgctgaagatccggacttctaccgccatatgcgcattcaggatctggctgccgggatccaccaactgatccgccagcacgatttaccgggcctgatgttgcgtgcgtttgacgtactgccggagatgaagctgacgccttatgagatgttccagcagcaggtgcgcggcaatgtagaaacctgcgagattgaccagttggtcggcaaggtggcggcgaacatgatcctgccctatccgccgggcgtgccggtcgtgatgccaggggagatgatcaccgaagagagccgcgcagtgctcgatttcctgctgatgctgtgttcgatcggcgaacactatccaggttttgaaaccgatatccacggggctaaactgaccgaggatgggcgctatctggtgaaggtgctgaaaaccgattagataagaatggcccctcaccctaacactctcctaaagggagagtgggccgatagtgccacatcctgacttttgtatccggggttggaggggaaataaaacgtgctacagaccaactctcatacctgattacggctctgtattagctctctctccctgtgggagagataccg

SEQ ID NO: 299 - DNA, 381 bp, unknown
  Altogen  635822 strain
  misc_feature (173)..(238): n is a, c, g, or t
cactctttgcctgcatccttgccagttttaacggtctttttccggttaaggatgaattggaatgtgtcgctggtaatgacccagtctctaccgatagcgatgcgcagcatgattagccccggaaatgtttagattgttgctcaaagagcgtttggcatgacacgcaacgggtnnnnnnnnnnnnnnnnnnnnnnnnnnnnnnnnnnnnnnnnnnnnnnnnnnnnnnnnnnnnnnnnnnacgtgctgcattaatctgactcatgagggtttcctgctggcgctgctgtactaaatccattaaatccggcatggctgttgctcctcttttttattaagttcaccaatcgcatcgcgacatagcccagcgatataagtcccttg

SEQ ID NO: 300 - DNA, 172 bp, unknown
  Altogen  635822 strain
acccgttgcgtgtcatgccaaaccctctttgaacagcaatccaaacatttcaggggctaatcatgctgcgtatcgctatcggtggtgactgggtaattaccagcgacacattccaattcattcttaaccggaaaaagacggttaaaaccggcaaggatgcaggcaaagagtg

SEQ ID NO: 301 - DNA, 61904 bp, unknown
  Altogen  635822 strain
  misc_feature (18117)..(18117): n is a, c, g, or t
  misc_feature (29992)..(30070): n is a, c, g, or t
  misc_feature (38647)..(38760): n is a, c, g, or t
  misc_feature (38791)..(38897): n is a, c, g, or t
  misc_feature (39008)..(39088): n is a, c, g, or t
  misc_feature (48000)..(48000): n is a, c, g, or t
  misc_feature (48029)..(48029): n is a, c, g, or t
ctttaaacatacaaggggactgatcgagttcgctggtttctctgagtcatacccaacctttcttcttattcatttctttcctatctagtaatgcctagcttctatttactccttactttccgaagcagcacgggctaactatatgctccggacagctccctctccctgcgggagagggttggggtgaggggcaatctcaacggctagaataaggggatatcttgcgctgtaaactccataaaatcacctgcctcaccccctcccaattgcgcaatacttcatcgttccaaaaacgaatcacggtaaatccctggcgttttagaaagcttgtgcgctgctggtcataagccgcctgcaccgaatgctgaccaccatccagctcaacaatcagcttcgcctgccagcacgcaaaatcgacaaagaaaggcccaaccggaaattgccgtcgaaacttaaaccccgccaagcggcgatcgcgcagctgtaaccacaaaaatttttcggcatccgtcatgcaagcccgcaatcgacgggttttggttaaggttgttgtttttgtcatagcgacctccgcaacaacgctacccttgcaaaagagggtcagccatagcctcctgccaaaactgcgtacctcatccaaaccaatcgttataacacctgagaaaaattcataagccggtggattcccaattgccgggcatctggttatgatgctgcatcgcacagaatagacatccagacataaagacagccatacatccaattttaccgggaactcttcacctgcttcggagccaataatgaaaatgataaagacctcactgctcgccctcagcctgctgacctgcctgcccctgctggccgcagaagccacgcttgcccccgttcctgacgctattgcccagcatcaagggcagatccgcgtcgcggtgatccgtaacctgggttccgatgacaacaccacccagtttttggccggagcaatccaggaggggcgcaagctaggtttcaaggtggataccttcctgagcaacggtgatgacgcgcgttttcaggacttcgttaaccaggccatcagccagaagtatgacggcatcattctttctcaaggtcgcgcgccctattccaccgatctggtcaagcgcatcgctgcggcaggtatcgcggtatcggcctttgataccgacgttagcggcgagatccccggcgtcaccgtttcccaacaggatgatgtctcgctggccaatgaatccttcggccagctgattaaagacttcgatggcaaggccaacattatcaagctgtgggttgcaggcttcccgccgatggagcgccgccaggccgcttaccagcagttgctcaagcaaaatccgggtattcatgagttggagtcgatcggggcggtatcttccgacgtccagggcgataccgccaataaagtcggtgcggtgctggccaaatacccgaaaggtaaaattgatgccatctggggcacctgggatgccttcagccagggagcctataaggcgctgcaagaaaatggccgcaccgagatcaaactctacagcatcgatatctccaaccaggatctgcaactgatgcgcgaagccggtagcccgtggaaggtcagcgttgcggtagataccaagctgatcggggccgtcaacctacgcctgattgccaacaagctggcgggtgagccaacgcctgccacctatcagtttaaagccgccgccatcccgcaggccctgctggtcagccagactggcccaatcaacgtagcttcactgagtaaaattattccaggctggggcagcagcgaagatttcatccaaccctggtttgctaccctgcaggctaaatccggtaaataatgctgttttaccgaggggctacagacgtagcctcttttttttaaacaatttttccgttccccccttctctgcatcacaaaataagctactgtagttgcactggcgtaataactgtatgcatcaacaggtttggttatgaagggattccccccactgattaagatattgctggcaagttcgctggtgctgaccataggccgtggcgtcacgctgccctttatcaccatttacctgaccgagcacttccacctgctgccgaaaagcgtgggcattatcttgggcgtcagcctgactatcggtatcatcagcagcttttatggcggctatctggtcgatcgctttaataaaaatccgttgatcctgctcgccatcctgctattttcgctgagcttttttgctatcccatgggtcacgcaccccgctggcgttatcttggtgctagccatcttacataccgcctatgcggtgctcagcatcgccatcaaggcctgctttgccagttggctgccggtaaaccaacgtatcaaggccttctcgatcaactatacgctggtgaacgttggctgggccgtcggctcatcattgggcgtgatggtagccgggtacagcccactgctgccattctacctgtccggcgggttggcattactgacggtgatcaccctgagcttccgcctgcgcaactatccatcgccaccgatagaagacaccggcaacactccaccgtcggttctcaacttccgccagacgttgaatgtgctacgcggcgatcggcggctgatttatttcacccttggcagcacgttaggcgcggtggtgtttggccaatttaccggctatctgtcgcagtatctgatcatcgttagcgatgccgaatttgcatacaaagtgattggcgtggtgatgatcgtcaacgcctgcatcgtaatcgccctgcagtatctgctgagccgcggtatgcgccaggacaacatgctgcgctggctgatgctgggcacgctgttcttcgtcctggggctgatcggctttatgctggcgggcctttcgatatggctatgggtgctggccatggcgatttttaccctgggggaaatcatcgtcattccggtcgaatatatgtctatcgattttatcgccccgccgcacctgaaaggcagctattacggcgtgcagagcctgagtaatctggggggagccatcaacccggtgatgtgcggcttcctgctgagctatgcgccaccgccggtaatgttcctggtgttgatcgccgctgcgttgttcagcctgctgttcttcttcctcggccatcggttggcggaacagcaaaagccgcttgccagcctgagcagcgcggaatagcctggcccgctacacttaaaggggccacaatcttgccaaaatggcatgataggcatagcgagaattcatgatgcgttttgtggcgtagctcacagtttaattgtatgatgaatgcgtcaacatcaacgagaatgcactatgggcaacctatttaacctgtgttggaaatatgtcagggcgatcgtgctgatctacttcagcctgttcgccggtaacgccatttcggcgctgctgccgatcgccatccccggcagcattatcggaatgttgatcctgtttgccctgctctcctcacaaattctcccagccaaatgggtcaagcctggctgccatctgtttatccgctatatggtgctgctgttcgtgccaatcggcgtcggtatcatgaagtattacgaccagatagttgacgatctggctccgctgatcgtgtcttgcctgatcagtacgctgctggtgtttgtggtggttggctatacttcacattacttccaccgcgagcgtcccatcctcggtaaagcaaaagatgcgggggatgagcaatgatgcaaaatatctggtggtccttgccgctgaccctggtggtgttttacgcggcacgcaagttggcgcaaaagctccatatgccgttgctgaacccattattggtctcgatggcggtgattatcccgctgctgttgctgaccggcattccttatgaacgctattttcaaggcagcaaaatcctcaacgatctgctgcaaccggcggtggtcgcccttgcctttccgctatacgagcagatccatcagatccgcgcgcgttggaaatccatcatcaccgtctgctttattggcagcatgaccgcgatgatcagcggcggtgccattgccctgctgatgggggccaagcccgaaattgccgcctcgatcttgccaaaatcggtgacgaccccgatagccatggcggtagccgagtcgattggcggcatcccggccatcagcgcggtgtgcgtgatttttgtcggtattctgggggcggtttttggccattcgctgcttagcctattgcggatcaacaccaattcatcgcgcggtttggcgatggggaccgcctcgcatgcgttgggtaccgcacgctgcgtagaaatggattaccaacagggcgccttcagttcgctggctttggttatctgcgggattattacctcgctgactgcgccgttcgtattcccgatactgctgcggctgtttggttaacgactaaaaacccgcgatacatctcgcatttataattttcattgcatttgtttcattaaaaaatagatattagtcacactttattgtgggccggttgcctagaatgttaacccgttaacttgtagagagacttcttatgcactcgcgctttcaaactgcctacggcgaattgccaacggccctgcaatccgccctgctgccttatttagatgcgcctgatttcgcagccatgttcaaggccgagcagattgcggcgatcaagcaacagtgcgggttggatgacgatgctctggcctttgctctgctgccattggcggcggcctgctcgttaacgccgatttcgcatttccacgttggggctgtcgctcgtggcgtcagtggcaactggtattttggtggcaacatggaattccgtggtgcacctatgcaacaaaccgtgcacgcggaacagtgcgctgtcactcatgcctggttgcgtggcgaagccaaactggttgcggtcaccgtcaactactcaccctgtggccactgccgccagtttatgaatgagcttaacagcggcaccgagttggagatccacttgcctgcacgggcaaccgccacgctgggtgattacctgccttactccttcggcccgaaagatctgcaaatcagcgagttgctgatggatccggtcgatcacggtttccaactgacgctggatgatgaactggcgaaagctgccctggatgccgccaaccgcagccatgccccttacagcaccgcccacagcggcgtagcgctggaagccgaagacggcaaggtttacgctggccgctatgcagaaaacgccgcgttcaaccctagcctgccgccattgcaggccgcactgatcctgatgaatgtctccggtggcgattgccagaaaatccaccgtgccgtattggcagaagcagaaggcgcaattctgacccagtgggatgctacaacggccaccctggcggccttgggttgccaagacgtccaacgcatcaccttctgatccctcaggcggagccatcgtgctccgccgcaatccggctaaaaaaccagcaacaaacgacaattcctcattatttactaacaaatgctgtacatattttgccgatatcttaggatcggcagtaataagcttaccctaggcaaagagtaaaactgatggaactggaatacgaaagcaaacgccctctctacatcccctacgctggccccattctgttggagttcccgttgctgaataaaggcagcgccttttccgaagaagaacgcagtaacttcaacctgcacggcttgctgccggaagcgatagaaaccatcgaagaacaggtggaacgcgcttaccgtcagtatcaggatttcaagaacgataacgacaagcacatctacctgcgtaatatccaggacaccaacgaaacgctgttctatcgcctgctggattcgcacctgagcgagatgatgcccatcatctatacgccaaccgtgggtgaagcctgtgagcatttctccgatatctatcgccgcgcacgtgggctgtttatctcctacccgaaccgcgatcgcatcgacgatatgttgcaaaacgccaccaagcagaacgttaaggtgattgtggtcaccgacggtgaacgcatccttggcctgggcgaccagggcatcgggggcatgggtattccgatcggtaaactctccctgtacaccgcctgtggcggcatcagcccggcctataccttgccggtggtgctggacgtgggcaccaacaacccgcaacgcctgaacgatccgctctatatggggtggcgtcatccgcgtatatctggtgatgaatatcacgcctttgtggaagagttcatccaggcggtaaaacgccgttggccgaacgtgctgttgcagtttgaagatttcgcccagaacaacgccacgccgctgcttaatcgctatcgtgacgaactgtgctgctttaacgacgatatccaaggcaccgccgccgtgacgctgggcagcctgattgccgccagccgtgccgctggcagccaactgcgcgatcaaaccgtcgccttcctgggggcgggatccgcaggctgtgggattgccgagcagatcatcgcccagatgaagtccgaagggctgagcgaagaagaagcccgctctcgcgtgtttatggttgaccgttttggcctgctgacggataagttgccgaatctgctcgatttccagagcaagctggtgcagaaaagtgccaatctggagcaatggcaggtggagagcgatgctatctccctgctggaagtggtgcgcaacgccaagccgaccgtgctgatcggcgtctctggccagccggggctgtttaccgaagagctgatccgtgagatgctcaagcattgcccgcgcccgatcgtgatgccgttgtccaacccaacctctcgcgtggaagcccgtccagaagatatcatcaactggaccgacggtgccgcactggtcgccaccggcagcccgttctcaccggtaacctataaagaccagttgttccctattgcccagtgcaacaactcctatatcttcccggggattggccttggcgtactggctgctggggcaaaacgggtccccgatgccatgctgatggccgccagccgtgccctggccgactgctctccgctggctaccgatggccacggcgcactgctgccgaatatcgatgatattcagggcgtatccaaatgcatcgcgatggaagtgggcaaagccgctcagttgcagggtgtagcagtggtgacgtcggaagaagcgttgtctaaagccattgagcacaacttctggcgcccgcagtatcgtatctacaagcgtacatcgttctaagttcctcaccgggcctgttagtcaggcccggttatcacgccaagaccagattttgctgaaaaatgcagcgtaatacctgcgctaaccggcacgccgcttgcgtctgccgagcaggtaaagtagccttgagtcttactttagccctcgttcgcgcaaggcatcaacatgtggaaacgcctgataattagcctgttcatcatcatttcggtgctgatgctgtcggctatcgcgctcgatcgctggataagttggaaaaccgcgccttacatttacgaagaaatgcaaacgctaccacaccgtcaggtgggggtggtgcttggcacctccaaatattaccgtaccggagtgcttaaccaatattaccgctaccgtattcaaggggcgatcaacgcctataacagcggtaaggtgaagtacctgctgctgagcggcgataatgcccagcaaagctacaacgaaccgatgaccatgcgccgcgatttgctggccgctggcgttgcgcctagcgatatcgtgctcgactatgccggtttccgtaccctcgattccatcgtccgtacgcgcaaggtgttcgataccaacgacttcatcatcatcacccagcgtttccactgcgagcgcgccctgtttatcgccctgcatatgggcatccaggcgcaatgctatgcggtaccttcgccaaaaaatatgatgacggtgcgcgtgcgcgagatctttgcccgcctgggagccttgaccgatctgtatatcctcaagcgtgagccccgcttccttggcccattaatcccgatatctgcgatgcacaaggtgccggaagatgcaccgggttaccctgcggtgtctccggagcagttggtggagctggagcacaagctggcggcagaaaaggttaaggctcagcagcagaagaagagttgaagtgaatgcccctcaccctaaccctctcccaaagggagagggaaccgtacgtgccacagattaaccccctgcgtctgactacaacaccaaatgcttaagcgagcgcagcatggccacaaataaactcctgtccctgaacgcagctccgttctgccccctctccttttgggggagggggctggggtgagggggaacagcgacgactggaataacaataagatggcatctctgccgtgtgacatagcaaaagcaaacggccagcatctgctggccgctatcgtaaagcataaaacagacttattttttcttggcgtacttcagggagtccagcgctaccgcgaagatgataatgctacccttgatgatgtactgccagtaagggttcacgccgatataggtcaggccgtagttgatgacggtaaagatgatcaccccggtcaccacgcccagtaccgtacctaccccaccggcgaacgacaccccaccgaccacacaggccgcgatagcatccagttcatacataaagccgaggttgttggtggcgctaccgatacgccctgcttccagcaagccaccaaaggcatagaacaccccagacagcgcataaatcatgatcaggttcagcgggacgttgacgccagagaccttcgccgcttcagggttacctccgatggcgaagatattcttgccaaagcgggttttattccacagcacccagacaaaggcgatcgcaataatggcgtagaaggtgatatatgacagcttgaagtcaccgaatcgcaagaacccttgggcaaaggtggagaatttcggatcgaaaccggccaccggtgaagcgcccacgtaatcgtaatacagggagttaatcccataaacgatgatcatggtgcccaacgtggtgataaacggcgtcacgttgaggtaggcgataatcaagccgttgaccaggccaatcaccgcgcccacggcgcaaaccagcaagatcaccagcgggatcgaccaggtttccatatgcgggaacactttgttgacgttatccatcgattgcagcagggtcgcggcaattaccgctgccaaccctacctgacgcccggcggaaaggtctgtcccctgcgtgacgatcagcccggccacgcccagcgcaatgataatacgcaccgaggactgggtcaggatattactcaggttcatcaggcttaaaaaggtcgggtcctggataataataatcgccagtaacaccaacaggaccagataaatgccaccttctttaaaataggtgaacaaggtttttttattcagtgcgctcataattacgatccttaaagatgcaaggaggctagccgcaatatttcattttgcgaggtctgtttggtattcacaatgcccgcaacctgaccattactcatcaccaatattctgtcggtaattcccaaaagctccggcatttcggaagagattataatgatccccttgcccttcttcgccaactcggtcattaactggtagatttcaaacttggcccccacgtcgataccgcgcgttggctcatccatcatcaggatttccggctgtgtcagcagccagcggccaatgatcaccttttgctgattaccgccggaaagcgaaccgatattggtatggtggcccggcgttttcacccgcatggcatcgatcacccattgggtgtcgcttttcatccggctgttatccagcaggcccattttgttcttgtattgacggatattggagatcagcgagttaaagccaatatccagataggcataaataccggtggaacgacgttcttccgtcaccagggcaaaaccgtggttgatggcttcgttcgcactgttattgttgatatttttaccgtgcagcttgatggtgccagccaccttctcgcggatgccaaacagggtttccacaatgtcggtacgcttggcgcccaccagcccggcaatgcccaggatctccccctgatgcagatcgaaagagatatcgcggatcgaaggctggcgcaaagaggtcaggcctttcacctctaaaatcacctcacccggcgtattttgacgatcggggaaacgctggctcagcgaacgcccaaccatcatcgagataatcttgtccatatccagcccttccagcggctgggtggcgatccattggccgtcgcgcaggatggtgatttcatcgcatagctggaagatctcttccatcttgtgcgagatatacacgatgccgcagccacgctctttcagcttacggataatggtgaacagatgattcacctccttctcggtcagagaagaggttggctcatccataatcacaattttagcgttgtaggagaacgccttggcaatttcgatcatctgcatctgggataccgaaagcgtaccgactttggcgcggggatcgatatcaatatccagttcgtcgaaaatttccttggtgtctttgtacatcttgtcctgatcgacaaacagccctttggtggggtagcgccccagccacatgttgtccatcacggtacgttgcaacaccaggttcagttcctggtgcaccatcgagacaccctgctccaacgcctctttggaacttttgaaatcgacttcctgaccctgaaacagaatactgccggagtcttttttataaatgccaaacaggcattttaataaggtggattttccggcgccgttctcccccattagtgcatgaatggagtttggacgtacgcgtaaattcactttgtctaatgcctttacgccaggaaacgacttactgatatccgtcatttccagtagccactcacgagagttttcggccataaatagtcctggctaattctggaaccagcactctcccaagctggcttgcagcagtggagaattaacgggttcttctaataagttcccccactgagaaaacagtgggggcatttctctctatctcggtttatttcacgaactgagacaggttatctttatctacacccacgtaaggaatacgcacgattttatcgacgatcttccattgggtgccgtcggcagcaggtttgcccgcggccaggttcttcgccagatcgaaggtcgccttcgcctgattgtcggcatcgttcagcacggtaccggccatcgctccggatttcaccattgccagtgcttctggcagggcatcgacaccaaagaccggaatgctgctcttgttatgagctttcagggcttcaaccgcccccatggccatcgcatcgttgttggcgatcaccacttcgattttgttggcgttagggccagacagccaagcgtccatcttgtctttagcctgagcggtatcccacatcgcggtgtccatctgcagttgctgagtcttatcgcctttttcattcagcgttttgatcacgtaggtggtacgcgcttctgcatccgggtggcccggctcacctttcaaaagcacatattggatctggccgtctttgttcagatcccaggctgggttggctttccagtgtttggcaatcagttcgccctggatcacgccagactctttagagtcggtaccaacgtaataagctttgtcgtagctatccaacgccttgcgggaaggttctttgttgtagaacaccaccgggatatcgttggcacgtgccttgtcaatcaccaccggtgcggcggctgggtccaccaggttgattgccagcgcttttacgcctttggcaatcagtacgtcgatctggtcattctgcttggactggtcattctgtgagtcattcatcagcagcgtgacatccggagaagctttggcatctttctcgatcgccttgcgcaccaccgacataaagttgtcgtcatatttgtaaatcgtgacgccaatgcgggtatcagcatgcgcagctgcgccaaacatcatgcttgcggccagcgcggccagggtgaaaaccttcttattcattgtctgtctccggtttgtagagggtcgtactcggtattaagcctttagccacaatgcacacagttgggcgtggcagtttcaaaagaattcctgtcatccgtgttgcttgttattcctgtgatgctgtgtcagcgccagattaaaagcttggctggcaagagcctttgcgctggaaaacgactagagcatagacggcactatgttaataatctgtgaattttctcacagattgaaaacggttacacaatattaaatgttcagagagtgaccgaagcctcactttgccacggcgcgacagaatggcggcgtaccagcgtcggcataaacaggtgtgaagcctgagactcaagctgcccggcagcgcccttaagcgccagctcggtagccagggtggccattgaaacgatcggataacggatgggggtcagcttggggctggtatagcgggcaatcgggatatcatcaaaccccaccagcgagaaatgctgcggtaccgtgataccgttttctttcagcaccgccatggcgccagctgccatggcatcgttataggcgaacacagcgctcaggtgcaggttgcggcccagcagttcaaccattgccgcttcaccgccttgcaggtccggtgagccgtaagcccgccagctatccggtggggaaaaaccggctgcggccatagcttggctatagccttgctggcgcagcgggccgtcttcgatagggtgatcggagcccagataaccgatccgctgatgcccctgtgagagcagcaagcgcatggcaacttcagcgccaaacacattgttcaggccaacgcagcggtgctcatagcccgttacaattctgttaattaacaccatgcccgggatctgatccataaaggcgatcagttctgcgtcatctaacgcttttgcatgaacaatcaaggcattgcagcgttgacggatcagcacctcgatggcatgacgctctttgtccgcctgatggtaactgttgccgatcagcagatatttatggttttgctgcgccaccgtgtctaccgctttcactaacgcgccgaagaacggatcggagacatccatcaccaccacgcccagagtttcactgctctgggtagccaatgcctgcgcgttggcgtttggccgataacccagttccgccaccgccttcagcacctgttcgcgggtctctttgctggtcagggcactgttgttcagcactcgcgagacggtagcgacggacacacccgcacgcttcgccacatcgcgaatggtggttgaatgcacagaattcatgaaacgtcccgaggtcgacagagtagacagtggcgttatcctaccccgtttgtcatcctcctcagcgtgaattccgtcacaggaaagaaaacgtttacatacaattttttaacctacctgcgccagatctcattttgtcggctgacggagactttcgcccgcggcaagggaagtcagcttgcgccatagccattccatcgggccctgtgcgaagtaacgcagccacagcgtggaaaacagcaggttagccagccacaccagggggacgaccgccaatagctgcaaacggtcgagttgttgatagaggccaaaacgaaagaacagcgtgctgcaaatcagggtttgtagcaggtaattacttagcgccatccgcccgacctgggttagccagtggctgatacgcaggcgggaaagcgttggccagaaaccgtagaccagagccagatagccaatggcctgcagcggcgagcccaactcacgcggcacctgcagcagaaagccactccagcgatactcccaattcagctgccactgcagcagcacaccgggtaactggatcagcaatgaaagcggtatcagccaggcggcctggcggcggtagtaagcaggtgaatagctgttacgcagccaaccgctacgcatcatgcctgcaccaaacagcatcagcccggccagttgccagccatactgcgcaccgatggctatcaggctggaagagagcagatccaggcggctgcgccaggcttccggcccaccttgcagcttccagaacgtctcatactgcaattcggccacgctcggctgccagaaactgcccggttcaccgtgagagataaaccctagcagcagcaacaccgccacgccgatcagatacagcaccgcaccggttttcaacagagtgaaggtattctgcgcgtcacggatcatcctccagcacaccaggccgatcagcccgtaggccagcaggatgtctccatcccataagaaaatggcgtgcccaaggccaatcagaaccaaccaggataaccgggcgcggatccagactttgccccgccgtagcaacagttgcagaccggcaccaaacagcagagcaaacatggccaggaacttgacctgagcgaacagatccaacagtgcccaggtccagacatcgcgtgtggagggcatccccagataggcggggttgaggtaggcggctttcggcaggccaaatgcgctgatattcagcagtagaatgccaaggatggcgataccgcgtacgcagtccagcgtagcaatgcgtggtagccggggagtttcgttagcgttcatgttattccgctgtatttcaatcagtaacaagacccctcaccctaaccctctcctacaagaagaggggaccgatcgagtgtgcttgaaattagtgtgattcactttcgatgaggaggttgattgagtttgtattcaagtctagtaaaagtagaaaccccattaagcagcagcctcgtattcatttgctgatatgacccttttgcttccaaaagagcagggacttatcagctccctctccctatgggagagggttggggtgaggggcagctatcaaccgtgatggtgacgcaccgcacgcaggaactcctggcgcgtattctggctggacttgaacagcccgcccagcgacgtagtggtggtagcactggtagcgtcacgaataccgcgagctttgacgcagtaatgcaccgcatcgatcgagaccgccacgttgttggtgcctagcagcgtttgtaacgccaccaggatctgctgagtcagccgctcctgtacctgtgggcggcgggcaaagaactgcacgatgcggttgattttcgacaggccaatcaccgagtctttaggaatatatgccacggtggctttaccatcgatggtgacgaagtgatgttcgcaggtgctggtcaaggtaatatcacgcaccgtcaccatttcgtccactttcatcttgttttcgatgacggtgatcttcgggaagttggcgtaatccaggccggagaagatctcatcgacatacattttcgcaatacggtgtggcgtttctgccaggctgtcgtcggacagatcgaggttcaacagctgcatgatttcagtcatgtgctctttgatacggcgcttgcgcgtctcgcgatccaacacttccccacatagcggggtttccaggccgcgcgcttcaagcgccgcgtgcaccagtgcagcttcattacttaacgatgtcatggcgatttctctccagcaggcggccccggcaatatccccgtagtctttcaaattgcagctgctggttactcgcccctatcaatccaggggaggaactggctgcggcttgaaagacgacggatagataacgtgaacccgatcaatattttcccccactctagatgagagtgagacgtttatccagtgattgtgtttcatcctggtatgaaaaatccgcatccagcccgtagcaggctggctgcggctatcccacattttttgtatgtattttactcaagataacgttggcttgctggccgcggcccgcgccggggtattgatcaccagcacaccggcgatcagcagccccagcaccgccacatacagcgcgggttccaggcgatgtgtcagcgccgttgacaccgccgagagcatcgggccaaccaactggccgatggcataccccgtggtcaacagcccggccatataacgtgcatgattcggagccaattccctaccgtgctggatagatagttggaccacgctgaggaacccaccaccggttagcatggcccctaatgccagaccggtaacacctggcaccacctcggcacaaagcacacccagtgcctgtacccacagcgtgattgccaaacgggtctgcgtggtgagccgatgacgggttgctataccgatgataattcccaacaccgctgcaccgccaaaaatcggccagacaaactgggcaaacaggctggcagggaaacgggccgccgccatctgtgacaggaaggtcgcaggcaggatatagccaaagcccgccaggctgtagctccataccaagcgctttaaggccgaagtgagcaccagaggctcaggcttcacatcgggacgatgcagctcccctgcccttggcaaattaatgctgatcgcggcaattaacaccaacgccaatgcaccatacaccagccaggcctgcgaagcgctcaacccccagctgttgatcgccaccgccagcatgccgctgatgaatatcccggcgccaggtccggcaaagaccgcagcactcagcgcgggacggccataatgcgccaaccgctcgttagtccaggccgccaccagcaccatcgaccaaccgctggcccagccaatcgcaaagcgcactgcaccgtgcagccactcccccgataccaaggcagacagcagcgtcagcgctaccgctccccatacgccaagccacaggcggcgctccacatggcggctggcacgcatcgcatcataggcaccgcacaggtagcccaggtagttgaccgccgctaccagcccggccccggtcagggtgaactggtgctcagcaatcatcagcggcacctgcggggtaaaggcaaaccggccaatccccatcgccacgatcaaagcaataaaaccactcaaggctatttttagcgccatcgctgtatccaacctgttaaaagaaagttgcggctagcatgccgcagtattacactcacaaaaactgaataatactcatcaagttcatcacgaaaagagaaggctatggatctcacccaactgcgcatgttctgctgcgtggccgaaaccggctccgtcgcccgtgccgccgagcaactgcaccgcgtgccgtcaaacttgaccacgcgcctgcgtcagctcgagcaggaactgggcaccgatctgtttatccgtgagaagcagcgcctgcgcctctcgccgatgggccataactttctctgctacgcccaccgcattctggcgctgagtgaagaagccatgagcatcacccatgccggggaaccggccggtaactttgcgcttggctcgatggaaagcaccgccgccacccggctacctaccttgctggcagcttatcatcagcgattcccgcaggtttccctttcactggctaccggcacctcaggagaaatcatcgagcgtgtacgcgcgggaaccttggctgccgcactggtagatggcccgttgcagcatgatgaactgaacggttgcgtcgctttccccgagcggatggtggtgatcacctgcctggatcatccgcccattcacagcgcccaggatgtcaaaggggaaaccctgtttgccttccgcgccagctgctcttatcgcctgcgcctggagtcctggttcaagcgtgacggttcattgccaggcaccatcatggagatccagtcttatcactccatgctggcctgcgtggccagcggtgccgggttggcgatgatcccgtattcggtgctcaacctgctgcccggctacaagcgggtcaaagttcattcactccctgccgacattgccgatactgccacctggctgttatggcggcgtgatgcgtttgggccaaacgtccgnggggatgcgtttgggccaaacgtccgcgcgttaaaacaactgattatagaacaggctgaaagtacggagatggatgcagaatccatcctcctgacagagtagccaaaatctgcaccactagaatttaatgaggagaaaatcatggaatttatcaaaacccgtgctgccgtagcttggggcccgaaccagccgctgaagattgaagaagtcgatctgatgccaccacagaaaggtgaagtgctggtgcgcatcgtcgctaccggcgtttgtcataccgatgcctataccctgtcaggcaaagatccagaaggcgtgttcccggcgatcctgggccacgaaggcggcggcatagtagaagcgatcggcgaaggcgtgaccagcgtggccgtcggcgaccacgtgatcccgctgtacaccccagaatgcggcgagtgcaaattctgtaaatccggcaaaaccaacctgtgccaggccatccgcgccacccagggcaagggcctgatgccagacggtaccacccgcttctttaaagacggcaagccgattttccactacatgggcacctccacctttgctgaacgcaccgtagtaccagaaatctcactggcaaaaatcagcaaagaagcgccgttggaagaagtttgtctgcttggctgtggcgtcaccaccggcatgggtgcggtgatcaacaccgccaaggtcaaggctggcgataccgtggcgattttcggcctgggcggtatcgggctatcggcgattatcggggctcagatggccagtgccagccgcatcatcggtatcgatctcaacaccagcaagtttgagctggctcgcaagctgggcgcgaccgatctgatcaatccaaaagattacgataaacctatccaggacgtgatcgtcgagctgaccgacggcggcgtcgacttctcctttgaatgtatcggcaacgtcaacgtgatgcgttctgcactggagtgctgccacaagggttggggtgaatcggtcattatcggcgttgccggtgccggtgaagagatcgcgacccgtccgttccaactggtgactggccgcgtctggcgcggttccgcctttggtggcgtgaaaggccgtagccaactgccggggatcgtgcagcgttatctggacggcgagttcgcgctgaacgactttatcactcataccatggggctggagcagatcaacgaagcgttcgatctgatgcatgaaggcaaatcgatccgttccgtgatccatttcgataaataagccaggaggcagaggatgacgatgtcattagaacttctcgaagagcaccgcatgttcggtggttggcaacaacgttaccgtcacgcggcgcagagcctgaattgcaacatgacgttcagtatctatctgccaccaccgcgcgacgataacccgccgccggtgctgtattggctgtcagggccgacctgtaatgatgaaaacttcacgttgaaggccggtgcccagcgcattgccgcagaattagggttggtgctggtgatggcggataccagcccgcgcggcgatgaggtgccgaatgacgaaggttacgatctgggccagggggcggggttctacctcaatgccactcaggcaccttgggatcaacactttcgcatgtatgactacatcagcgatgagctgccagcgctgatcaagcagcatttcagcgtcagcgatcggcaatccattgcgggccactcgatgggcggccatggtgcgttaatgatggcaatgcgtaacccgcagcgttttcgttcggcgtcagcctttgcaccgatcgtcaacccttgccaggtgccttggggccgtaaagcctttgcggcctatctgggggatgatgaaacgcagtggctgcactatgacagttgccatttgctggccagcggggcggagcagttgccgatgttgattgaccaaggagatggggatcagtttctggcggatcagctgcaaccggccaagctggcggagttggcacgccagcgtgactggccgttaaccctgcgcattcaaccgggttacgaccacagctacttcaccatcgctacctttattgaagatcatctgcgttttcatgccgagcatctgttccgctaattgatttgcccctcaccctagccctctcccacagggagaggggaccgatcggactcgctgttttttctgtgtaataccctgactttcgttttacttaccacacacttaccgaagcagcacgatcccaccaaaggctccgggcagctccctcttcctgtgggagagggttggggtgaggggtcatcccttcagtttcggatccaacgcatcacgtaacccatcgcctagcaggttaaacgccaatacggtgaagaagattgccagactggggaagatcgccacatgcggggctatcaccatatccgcacgcgcttcattgagcattgccccccattcgggcgttggcggctgcgcccccaatcccaagaatgacaggctggcggcggtaatgatcgaagtaccgatacgcatggtgaaatagaccacgatcgacgagatggtgcccggcaaaatatgccgcaggatgatggtccagtccgaagcgccgatgctgcgcgccgattcaatgtaggtcagatgcttcagcaccagagtattaccacgcaccaggcgcgcaaacgccggaatgctgaagatggccacggcgacaatcacgttcgccatgccgctgcccatgatcgccaccacgccaatcgccaacagaataccagggaaggcaaacagcacgtcgctgatgcgcattacgatgcgatcccaccagccttcgtaatagcccgccaagagcccgagcaccgtgccaatcacgctgccaaccagcaccgagaacaccccggcagccaaagagatccgcgcgcccatcagaatacggctgaaaatatcccggcccaacgaatccaccccgagccagtgcaccagcgaaggcccttcattgagccgatcgtaatcaaagaagttttccgcatcataaggcaccagatgcggtgccagcagcgctgcggccaccagcagcaacacaaacacgccggccaccattgcgacctgctggcgacgaaagcgccgccagaactcatgccaaggcgtacgcaccgcgttgggattaatcaccggcattgccttgagcgcggcgttacgccgccaatacttcatcatacggcctgcctattggtaacgaatcgaagggttgatggccgcatacagcatatccaccaacagattaatcagaataaattccagcgagaacagcagcacttcggcctggatcaccgggtaatcgcgcatttctaccgaatccaccagcaagcgccccaaccccggccagttaaacactttctcgaccacgattgagccacccaacaggaaaccaaactgtaggcccatcatagtgatcaccgggatcatggcgttgcgtagcccgtgtttgacgatcaccagagactccggcacgcccttggcgcgagcggtgcgcatgtaatcttcctgcatcacctcaacgaacgaggcgcgggtgaagcgggccatcaccgccgctaccgcagcacccagcgtgattgaaggcaggatgtaatgctgccaggtatccgctcccaccgtcggcagccagccgagattgactgagaacacctgcatcaacagcatccccaacgcaaaggccgggaaagagatacccgacacggccagcgtcatccccacccggtccggccagcggttgcgccacacggcggaaatcatgccgatcgccatgccaaaaatcaccgcccacaccatgctggcgatggtcagccagaaggttggcataaagcgcgaggcgatctctgcactgaccgggcgtttggacaccatcgacgtgccgaaatcaccctgcaaaatattgacaaagaaatgcacaaactgctgtggcaacggctttttcagcccccgatcctgacgcaccaactggacgacggcttcgtctgcctccggccccgcggccaaccgcgccggatcgcccggcagcatatggacaaacaagaacaccagcacggccacgatcagcagcgtcgggatcaggcccagcaggcgttttagaaaataattaagcattcccctcaccctaaccctctcccacagggagaggggactgaatgtgctactgattaagttccgttgctaacctcaccaccggaacagtgccataaattaacgcctgtaactgttcacaacacccaacttctccctctccctgtgggagagggttggggtgagggcctatttcaaatccgcgttatcaaagttaaacgaggtgtccggcatcacgtagaaaccgctcagctgtttgttgttggcagacagcaggcgctccgtcaccaggaaaatccaaggcgcatcggcccaaatgcgatcttgtgcatcttggtacaaagcctgcttctgggcacgatcggtggtggccaacgcatcagccagatccttgtcgacctgtggattgctgtaaaacgcagtgttgaactgcttaggcggtgcggattgggtggcaaataacggcgtcagcgcccagtcggcttcgccggtcgaagcagcccagccggtatagaacatacgcacgccagtgtccttcacgcccacgctctccacctgcgccgcacgttggccagcatccatcgcggtaacggtcactttgaccccaacctgcgccaactgctgctgagcaaactgcaacactttctgcgcggtgctgtggttatgggaagaccacagtgtggtagtaaacccgttcggatagcccgcttctttcagcagttcacgcgccttggctggatcgtatggccaagcgttgtagcgggtagcaaaatcaatggccggaggcaccgggccttccgccggaacggcaaacccagagaacgccaccttaatcagcgcgtccttgttgatcgcatagttcagtgcctggcgcaccttcgggttatcgaacggtttctgcgtcacgttcatgctgatgtagcgttgcaggatcgacggcgcggccaccagatccagcttgctgttcttctccagcaccttggcttgctcataagggattgggaacgcaaaggtcgcttcaccggtttgcagcatcgccgcacgggtgttgttatccactaccggccgccaggtgatgctgtccagcttcggtaagcccgctttccagtaaccgtcgaatttcttcactttcacatagtcggtctggttccaggtttcaaactggtaagggccggtccccaccggatggaaaccgatctccttgccatactgcttaagggccgccggggaaatcatcgccgcagccgggtgcgccaggttattgataaacgccgagaatggcgctttcagcacgatcttgaccgtggtgggatcgaccacttcggttttatcgatcatcttgaacaggttgtagcgtttcaggcgattatccgggttactggcgcgatccaggttaaccttgaccgcttcggcatcgaacgcgctaccgtcgtggaattttacccccggctggagcttgatggtgtaggtcaagccgtctttgctgacgtcgtagctgtctgccaatacgttcaccagcttcatatccttatcaaagccaaacaacccctgatagaaggatttggcgaccgcctgcgacaaggtgtcgttggcatcgtacgggtcgagcgtggtgaagttggacgctacggcaatcaccgcatccttggcagcccaagccgggccagcagcggcggccagcagtacggcggccaaaacattacgcttgaatgtgtgcttagtcatagtgcttaactctcctgaggcaaggctaaaaggcaccggcaatagggtggcgggccacaaagtgccctggccctacctgcactaaaggtgcggtaacgggttcatcatccagcccacggatcgggctgggtatttcatccaccagcaacggctggcgtttatgcgcatgggtgggatcggccaccggcacggcggccatcagcttacgggtataggcgtgctgcgggttttcaaacaccgcccggcgtgggccgatctccacaatctggcccagatacatcaccgcgacgcgatggcagactcgttccactaccgccatatcgtgggaaataaacagaaatgcgatgcccaattcacgctgtaaatcgagcagcagattgacaatttgcgcctggatcgatacgtccaacgcggagaccgcctcatcggcaatcaccactttcgggttgagtgccaacgcacgggcaatgcaaatacgttggcgttgaccaccggagaactcatgcggataacgccgcgcatgttccggcttcagccccacccgctccaataaccaggccacccgtttttcggcctccgccccgcgagcgacgttgtgtaccagcaacggctccatgatggagaaaccaacggtgagccgtgggtccagggaagcgtaagggtcttgaaagataaactgaatatcacggcgtaaatgctgtaaggcagagcctttcaagcggttgatctgctggccgttgaaggtaatggtgccgcgttggctatcgaccagcttcaacagtgaacggccagtggtggatttgccacagccagattcgccgaccaatcccagcgtttcgccgggatagaggtcaaagctgatattttccaccgcatgcacacggcgcgtgacgcggttgagaatgccgctgcgcagatcgaagcgcgtgaccagattttctacctgcaagatcggcgtagctcctgcgggtatggtgtcttgcggctggtcattatcgtcaacgccagctaacggaaattttgccgggaagtctttatctgccatcgcgcccagctgcggtacggcggccaacaaagcttgagtgtaaggctgctgcggagcggcaaacaacgagcgcacctccccttgttccaccttttcgccttggtgcatcaccagtacccgatcggcaatctccgccaccacgcccatatcgtgcgtaatgaagatcacccccatgtgcatttcctgctgcaacacgcggatcagctgcaggatttgcgcctgaatggtgacgtccagcgcggtggttggttcatcggcaatcagcagcgccggtttgcacgacagcgccatggcaatcatcacccgctggcgcatcccgccagacagttgatgcggatagcggccaaggacgtttttggcctcgggaatacgcaccagatcgagcatacgcagcgcttcacgtttggcactgcggtgatccataccctgatgcagacgcagagattcggcgatctgctcccccaccggaaacaccgggttgagcgaggtcatcggttcttgaaaaatcatcgccatatcggcgccgcgtaaagttcgcaaggtgctctgttttgccttggccagatcgagcacctgaccgttacgccggcgaaaatgcatcgcgccgctgatcaactcaccgccgccctgctcgaccagacgcatcaacgccagtgaggtgaccgacttgccggaaccagattctccaacgattgccagagtttcgccacgatcgacgtcgaaatccagatggcgcaccgcctcaatgacgtcgccttcttggcggaattgtacgcacagatcgctcaccgccaagacgcgctcgggcggtaaaatcagcccacgttctgcctgtggctggatggccgtatcggtcatttgccctcccggcaagcattcagcggtagatacccacggaaggggcatcgccgacatagccgaaaccgcgatacattccttcactgttaaacggcagtgcgacgttgccaaaacgatcgatagcaatcagcccgccgctaccgcccagtgccaacagcttttccatcaccactttatcgcaggcctgttgcagggttagaccggcatattcaatcagtgcagacacgtcgtaggccgcgacggtgcgcataaagatttcgccggtaccggtgctggagaccgccaccgtggcgttgttggcatagcaaccggcgccaataatcggcgtatcgccaatgcgccctgccgccttattggtcatgccgccggttgaggtggccgctgccaagttgcccaaggcatccagcgctaccgcccccacagtgccaaatttgcgatcgggatccagtgggtcaccgctgagcgccgccgcaccgtcgtgatcgagcaacacccggccctgctctgcctgagcacggtgcagttggtcaaaacgttcctgggtaaagaagaaatcgggatcgaccatttccaggccgtgattggcggcaaatctttctgccccttccccgccaaacagcacatgagtgctgttttccagcaccgtacgcgcggcaagtaccgggttacgtatccggctgaccccggcgaccgccccggcatcacaggtacggccatccatcacgcaggcatccagctcatgagtgccttggtgggtaaataccgagcctttacctgcgttgaacagcgggcactcttccagcagcctgactgcctccgttaccgcgtccagtgcgctgccgcctgcggccagaatagcctgcccggcagccacaatgtcggaaagcgcctggatataatcttgttctttctctgcactcaatgccgcacgggtaattgcgcccgcaccaccatgaatggcaatcactggtttgctcattgacctgacacctgtgtctatccgcggtaattcaagcaggtaccgcatgaaaatggagagaaaattattatttagcctttttcgactatatttagcccggcaatcgatgtaaagcacaaactcgtcgccaagcattaagcgtagcctgcttagactattttgtgcattgaaagagccaaatgttataaaaacagtgagttatctagcttttcatttaccactgacggatttaaccggcctattgtcggcgtcaggaaatagcccgatttggctcaggtttaataagcggtggccatgcccttctccgctattccccgcttacacgccaatgaaaaatatttagaaacccgaccccggttgttgcagaaattcctgctcctcaagcgtagattcccggcctaatatctcgttacgatggggataacgtccaaaacgttcgattatggctttatgacgtatttcaaactccaactggtcaccattatttaattggcgaaacagctccaacgcctgctggtggatcaacgcggattcggaatgcataaaaggtaaataaaggaagccgcgctgctcgaccgtcaggttttcacatagcccagtggcgatcgcttcctgagccagcaccagcgccattccgtcacaagcaaaggagcgtggcgtgttacggaacagattacggctgaactgatcgagcacgatgatttccgccagtcttcctttgatggttgcacgccaatgtgccagttctccttgggacgccgcctgccacagttggccaaagcgggtgcgcagtacacgatcaaactcatcgtcctttctaaaccacatgactgggtcgatctcttcgaaccaaaaatccagtacgtgctggtgcataactgtctcctgttattgatttcaatacgttaacctggtttctccaccacggcgttatctgccataatagccctactttgccgaaaaattcgcgcacgccgattacggagttttgtttatggatcactgtcatacttctgacctcatttctcttgagcaggcactggagaaaatgctctcccagatcgcgccactgcaacagagcgaatctatcgccttgaccagcgcagccgggcgcattaccgccgccccagtggtctcccctatcgatgtcccgcccttcgccaactcggcaatggacggctacgcagtacgtctaagtgacctgaacggcaactctcctttaccggtagcgggtaaagcctttgccggtgctccgtttacggatacttggcctgctaacacctgcgtacgcatcatgaccggagcacccattccagccggtgcggatgcggtgatcatgcaagagcaggctgaagtgaccgaggctggagtgcgtttcaacgccccggtaaacgccgggcaaaatatccgtttggcgggggaagatatcctgcgcggggcgagcgtgctacccgctgggatcaccctgggggcagcacagctaccattactggcctcattgggcgtggccgatgtccaggtgatgcgcaaattgaaggtggcggtattctctaccggtgacgaattgcagccggtcggccagccactgcaagccgggcagatctacgacaccaaccgctttgtcgtacgcctgatgctggaacagctcggctgcacggtgatcgatctggggattattcgtgataatcaggaagcattacgcgcggcctttatccaggcggatagcgaggccgacgtggtgatcagcagcggcggcgtttccgtcggtgaagccgattacaccaagcagatgctggatgaactgggcaaagtcagcttctggaagctggccatcaagccgggcaaaccttttgctttcggcaagctccagcacgcctggttctgtggcctgcctggcaacccggtctctgctgctttgactttctatcaactggtgcaaccgctgctggccaagctggccggtcataccgaatggcaactgccaccccgcctgaaagctcgcgctctgacgccactgaaaaagtcgccgggtcgcctcgatttccagcgcggtattttcaccagcaatgcccaaggcgagctggaagtgagcaccaccggccatcagggttcccacgtgttcagctcattcagccagggtaactgctttatcgtgctggagcgcgaacgtggctcggtggccgctggtgagacagtagagatcgaacctttcaatgcgttgctgaggaactgaacatgctgccggaattaaccgatgcacaagcgctgcgctacaaccgccagatcgtactgcggggtttcgacttcgacggtcaggaaaagctgcaggcggcgcacgtactgatcgttgggcttggcgggctgggctgtgcggctgcgccttatttggctgccgctggcgtcggccatctgacgctggttgatttcgacacggtttccctctccaatctacagcgccagatcctgcaccgggatgatcgcattggtatggcgaaggtcgaatctgcccgcattgagctgagtgccatcaatcctcatatccgtattgataccctagacacacagctggatgacgagcaaatggcggcgcagattgccgcttgcgacgtggtactggactgtaccgataacgtggcgacccgcgatatgctcaaccgcctgtgccatgcacagcgtaaacctctggtatcaggggccgctatccgcatggagggccagctcagcgtctttacctatcaaccggaacagccctgttatcgctgcctgagcaggctgtttggggaaaatgcgctgacctgtgttgaagctggcgtgatggcccctttagtcggcactatcggtacgttacaggcgatggaagccatcaagctgttggcaaactatggccagcctttggtggggaagttgttgatgtttgatgcgatgagcatgcagtttcgcgagatgaagctgccgaaggatccgcggtgtgaggtgtgtggtaaagatgctgcccctcaccctagccctctcccacagggagaggggacagatcgagttcgttaattcttctgcgtaatacctatcgttctctactcatcacgttccgaagcagtacgagctaaccaatcgctctggactgctcactctccttatgggagacggaacgnnnnnnnnnnnnnnnnnnnnnnnnnnnnnnnnnnnnnnnnnnnnnnnnnnnnnnnnnnnnnnnnnnnnnnnnnnnnnnnggctaaccaagcactctggactgctccctctccctgtgggagagggttggggtgagggccgactcgaagggatcagttgataccctggctacgcaggtagtcctcgtagttgccggtaaagtcgatcaccttgttcggggtcatttccagaacgcgtgtggccagcgagctaacgaactcacggtcgtgggaaacgaagatcaaagtcccttcgtacatttccaacgccatgttcagtgactcgatggattccatatccatgtggttggttggttcatccatgatcaggatgttcgggcgctgcatcatgatcttgccgaacagcatacggcccttctcaccaccggacagcacttttacgcgcttcttgatatcgtcctggctgaacaacaggcggccaagaatgctgcgcaccgcctgctcatcgtccttttcctgcttccactggctcatccagtcgaacacgctcagggtttcatcgaactcgtattcgtgatcctgtgcgtagtaaccgatcttggcgttttcggaccatttcacggtgccgttatccggttgcaggtcacccaccagcgttttcagcagagtagatttaccgataccgttggcacccaggatcgccactttctcgcccacttcaaccatcaggttgagtttgctgaacagcgggccgttgtcgaagcctttggccagcgcttccacttccagcgcgttacggaacagtttcttgtcctgttcaaaacgaatgaacgggttctgacggctagaggctttcacctcttccaactggatcttgtcgatctggcgggcacgggaggtagcctgcttggatttggatgcgttggcactgaagcggctaacgaaggactgcaattcgttaatctgcgccttcttcttggcgttgtcagacatcaggcgctcacgagcctgggtagccgccgtcatgtattcgtcgtagttacctgggtagacacgcagttcgccgtagtccagatccgccatgtgagtacaaaccatgttcaggaagtgacggtcgtgcgaaatgatgatcatggtgctgttacgttcgttcagcacctgctccagccagcgaatggtatcgatgtccaggttgttcgttggttcgtcgagcagcaggatttccggatcggagaacagggcctgagccaacaggacacgcagtttgaagccgggagcgatctcgctcatcgggccataatgctgttctaccgggatccccacgccgagcagcaactcaccggcacgtgcttctgcggtgtagccgtccatctcgccataggccacttccagatcggccactttatagccgtcttcttcgctcatctccgccatggcgtagatgcggtcgcgctcttccttcaccgcccacagttcggtgtggcccatgatcacggtgtccagcacgctgaactgttcaaaagcgaactgatcctggcgcagtttacccaggcgctcattcggatccaggaacacgttaccgccgctcggcgccagatcgccaccgaggattttcatgaacgtcgatttaccgcagccgttggctccgatcagaccatagcggttaccgccgccaaatttgacagagatgttttcaaacaacggcttactgccgaactgcatagtgatgttgttagtgcttaacacagcgctcgctcttaatttgattgggaatgtgatttggcgcgcattatgccataacgcaacacagagatcgtgggaagttttggtgaagatttgctcggcgctcggggtgtggagatattcgccagctaaatatccccatcagaacgaattaacggataaccaaacccgtcacttttttagcccatttccttgacctgatcttgcaacatcgcaatcaacgcccgtgaagctgcactgcggtaaccctctttgcgttgcaacaccacggcatggcgttcgggcatgggaaccgacagcttgataggcagcagcagcggattactccgtgcaatggcctgcggcagaatggtcgcgagctggccgtggcgcacaatctcgacaatggcgctaatcgcattcgcctccatggcaacctgaggataaatcgcgtgctgctggcaatattcgtccacgtaatgacgcgtggcgaaatcaccgttgagtagcaccaatggcacctgttgcacctccgctacgttcaaggcagcgcggtgcttggtaagctgatgccccttccccaccatcagttgcagccgctccgtgaacagcctggtcgcggctatatccgcagagtgaaccggctcgaaggcaatcccgagatccaattggtcatcgcacaataacgcctccatcttatcctgcgtcatctcacggatattcagcgtaatacctgggtagcgccggaaaaagccgtcgaccaacgggccaatcaggtaggaggtaaaggtcggcgtcatagccaagcgcagattgccgcgttccaacgttgcgacatcctgaatggcccgcttgccagcatccagatcctgtaacgccagacgggcatagcgcatccacgcctgccccgcatcggtgagttgcaccctacgccccgaacgatcgaacaacgctacctgtaacgtctcttccaactgtttgatctgctgtgacaaggtgggctgagaaacatgcagcacctctgccgcccgggtgaagttcccctgctcggccaccgccagaaagtaacgtatgtgccgcagtaacataacgcctcaactattagttattcctatcgtgacgattataaatgagtcttggaacctatagctagaaaagtccattcttgcctccattgaaagcaagccacacattgatggagtcaccatgcaagaggttattgacggttttctgaagttccagcgcgaggcatttgttgagcgtacagagctgttcaaacgtctggctaccagccagagcccacgcaccctatttatctcatgttccgacagccgattggtgccggaactgatcacccaacgcgaaccgggcgacctgttcgttatccgcaacgcaggcaatatcgtgccttctttcgggcctgagcctggtggtgtttcagcctcggttgaatatgccgttgccgcgctaggcgtagaggatattgtgatttgcggccactccgattgcggcgccatgaccgccattgccacctgcaaatgcctggatcacatgccaaccgtagccaactggctgcgctatgccgatgcggccaaggcggtcaatcaggccaatgagcacgccagcgagcacgatcgcattaactcgatggtgcgtgaaaacgtcattgcccaactgaccaacctgaaaactcacccttcggtcgcgctggcgctcgatcgaggcaatctgcggctgcatggctgggtctacgatatcgctaccggctggattgacgcattagatggcaatacccgccgtttcgtaccgttggcgagcaacccgagcgtcaccgccagcccagccatgcaacgtttctaacctattaatcatcaagaggatttcacatgacacaatctctacaaaacacttgcgcacgccagaacctgaccgacatcatcatggatgccaaagtccgccagggcctgacctttgaggcgattaaccaaggcaccggcttgagcctggcgttcgtcaccgccgcactgcttggccaacacccgttgccggaacaggccgcccgcgtggttgcagcaaaattgggtttggatgaagatgcggtgcgcctgctgcaagccatcccggtacgcggcagtatccccggcggtgtgccgaccgacccgaccatctatcgtttctacgagatggtacagatctacggctcaaccctgcgggcactggtacatgaacaatttggtgacggggtgatcagcgcgatcaacttcaagctggatatcaaaaaggtccaggatcccgatgggggtgaacgcgcggtgatcacgctggatggtaagtacctgccaaccaagccattttaatcattaagttatcaaatcattaagttaatacaatccagcgccggaacctcggcgctggatcattcaaccatgaaaatggcggctatccgccggagcctgctcacgcggttccaagccataatcccgcaccacctcggccacccgtaaccggtaatattccaacacctcatgcctgccacgcgcctgggcctgacggtgttgctccaggttgcgccactgctgtaccgccgcctcatcacgccagaacgacagcgataacaacttgtccggctcgctcaggctctgaaaacgttcgatagagataaagccgtcaatttctgccagcaacggtttcagctccgccgccaactctagataggtttcccgctgcccagcggcagcccgtagttcaaaaatcaccgcgatcatcatcgttctcctcggcagtataaaattcaggtacacgcgcattttgcgaaacacgccagcgaaactggcttaacagttcgggcttaaggttgagtttggataaatggccgatccccaccaaggcgatcaaccgtgcccaacgttctccagggcaacgatgagcaccatgaccaaaggcaaaactctcctgcggcgttttcaactgcaccaatacgctctgccccaccgccagcgtttgaccatcaagcaacgtagcctgtcgcgcaaacctgcgggtagtatggatcggtggagtttgctgcaacaccgcctggatcaacgcctctgccggttgatggcgctgacttgtcagtaacagcgtctggccgattaatccggcggtcccctcacaggcttggaacagtagcccgatggcattggctatcgccagagcacgatcgccaatgtattggcacaattgatagagcagcggcccatcagcctgctgcatacgagtttgcaattttccggcggcaatggcccccgcagccatctgctctgcgctaccgccaggagcaatacagcgcacaaagtccaacacctcgtccaccaaggcagatcgatcctgatgggccacgcccaataagtctgccagcacgcaaatcggcaaagcgtagttaaaccgggtgagttgctctgccgttgtcaaaccggccgctaaccgttgagccacgcaaaccgtagtctggcggatctcatcgtctgtgaacgcggccagagcctcctcgatcgccccctttaattcacgctgcccggcaccatcattcatacgtaccagagaggcgaaaatcgattgagcgggcgtcccaattaaagctgcgggtaccggctcatccttggggcgaacgccgaggtgaggatgggttaaggcttcacgcaccgcttgccgcgatgcaactgaaaaggggcaggccgtcatggcaatttccttcagatggtaatagagagtagccattgtcgggttagacgagcagcaatacttcggttattctcgaagtatgaatgacaatacgcttgaagaccgcctggccgcattgacggccgctatcgccgatcgcacccgagcgcgcatgctgtgcctgctgatggatgggcgcgcctataccgcaacggagctgagtgcggcggtggacgtcgcggcctccaccgctagcagtcatctggcacgtttgcaggaacagaatctgatcggctgtgtcaaacagggccgcaatcgcttttaccgtctggcgggcaaaccggtggccgacatgctggaaagcctgatggcgttggccggtgtagaacgcccgacggtcaaaagtagcactccggcctcattacgctatgcacgaacctgctatgaccacatggcaggtgagatcgcggtccaattacatcatcagttgctggcacgggcctggctaatcggggataacgactatcagctcagtgaggctgggcaggctgccttgacacagttgggtaccgattgctccccagccccgacccggcggcgctttgcctgtgattgtctggattggagcgaacgcaaggctcacctcggtggcgctctgggcgctgccatattggccgcatttgaaaagcgcggatgggttcagcgccagctagacagccgtgagctgcaactgaccgccgccggtagaaaagcgctgagcgcacattttggcctggcgctttaaatgcctgacgcgctagcttagctgccatactcaatgggtttacctgttgacgatcccgtcatatccgaggagttatcatgtccgatattaaccaattcccgatcgccaaacgttggcccgccaagcatccagaacggttacaactctactcgctaccgacccctaatggagtgaaagtctccatcatgctcgaagagatcggcctaccttatgaggcacacctgatcgatatcggcaaaaatgaaacctggacgccggagttcctgtcgctcaaccctaacggtaaaatcccggcgatcctcgatcctgccggcccagacggcaaaccgttagcgttgttcgagtccggggcaatcctgctatatctggcagagaaatgcggtcagttgttacccaaggatcccgcccagcgttatgaaaccatccagtgggtgtttttccagatggcgtccgttgggccaatgttcggtcagctaggcttcttccacaaattcgccgggcgtgaatatgaagacaaacggccatttgaacgctaccagaaggagtccaaacggctgttgggtgtgctggaagaacggctgcaagggcgcgattggatcatgggttcggaatacaccattgccgatatctccctgctcggctgggtacgcaacctgatcggtttttatgaagcgcacgacgtggtggagttcgacaacttcccccttgttggccaatggctggaacgcggattggcaaggccagccgtacagcgcggcatcaatattcctgcccgccaagcctgataacccattgggatagccaggaaaggctatcccttctcactcgtctttcgtcataaaaatgtcactttcctgctctactctcccgtgtaacaaaataatgccaaccgtatttttgtattacgacaaggagccctacccatgcagcagtccgtttccctgatcgccagcgccgtattatccgctctgttatgctccaccgccctggctgacaacaatcagctcaacaaccgcgcggctcgtggcgatattaccgaacccggcggtgcacgccgattggcaagcgatcaaaccgccgccctgcaagcttcgctgtcgaataaaaccgccaaaaacgtgatcctgctaatcggcgacggcatgggcgattcggaaatcaccggcgcgcgcaactatgccgaaggcgcaggcggttatttcaaggggatcgatgccctgccgctgaccggccaatacacccactactcgctggataagaaaagccataaaccggactatgtcaccgactctgccgcctcggccaccgcctgggctaccggcgtcaaaacctacaacggcgcgttaggcgtggatgtgaatggcaaagatcaaccgacgattttggaactggccaaggccgcaggtaaagccaccggcaacgtctccacggcggaactgcaagatgccacaccggcggcactggtttcgcacgtaacctcgcgcaagtgctacggcccagaggagaccagtgagcaatgtgccagcaacgcgctggaaaacggcgggcacggatcaatcaccgagcagttgattaaaacccgtgccgacgtcacgctaggcggtggggcaaaatccttcgctcagttggcgaaaagcggtgaatggcaggggaaaacgctgaaagcccaggccgccgcgttaggctaccaatgggtggaggatgccgaaggtctgaacgcgattaacctcgccaatcagcaaaagccgctgttaggcctgtttgcgccaggcaatatgccagtacgttggaaggggccaaaagcgtcctaccacggtaatctcgatcagcctgcggtgacctgtgagaataacccagagcgcggcaccaatgtgccaacgctggcggcgatgaccgagaaagccatcgagctgctgaagaacaatccgaacggtttcttcctgcaggtggaaggggcgtccatcgacaaacaggatcatgatgccaacccatgcggccagtttggcgaaacggtcgatctggatgaggcagtacaaaaagcgttggagttcgcccgcgccgatggtaataccctggtgatcgtcaccgccgaccacgctcattccagccagattattgccgccaaggccaaggcaccggggctgacccaatcattaaccaccaaagacggcgcggtgatgaccatcagctatggcaactcggaagaaggctctcagggccataccggcactcagttgcgcgttgccgcttatggccctcatgccgccaatattgtggggctgaccgatcagaccgacctgttcttcaccatgcgcgacgccatgaacatcaagtgatccagaggggcatgttcccctcaccctaaccctctcccaaaaggagaggggaccgatcgagttcgctgatttttctgcgtaatatatcaaccatctatctttctcatcacgttnnnnnnnnnnnnnnnnnnnnnnnnnnnnnnnnnnnnnnnnnnnnnnnnnnnnnnnnnnnnnnnnnnnnnnnnnnnnnnnnnnnnnnnnnnnnnnnnnnnnnnnnnnnnnnnnnnggcaactccctctcccaaaaggagaggggannnnnnnnnnnnnnnnnnnnnnnnnnnnnnnnnnnnnnnnnnnnnnnnnnnnnnnnnnnnnnnnnnnnnnnnnnnnnnnnnnnnnnnnnnnnnnnnnnnnnnnnnnncttcatccatcttctttctcatcacgttccggaacagcacggcctcatcagagacgcagagcaactctctctcccaaaaagtagggaggaccgatcgagttcgctgatttnnnnnnnnnnnnnnnnnnnnnnnnnnnnnnnnnnnnnnnnnnnnnnnnnnnnnnnnnnnnnnnnnnnnnnnnnnnnnnnnnacgtaatacatcacccatctatctttctcatcacgttctcgagcagcgcagcctcatcagagacgcaggggggctctctcaccctatgggttgaggagcagctaaacccctacccctggcggagcatttttcgccacgtcaattatccaagtttacccttgcgtaaccgcccatgcgcgcctattatcaaagaataaacttggattattaagtcccatttgactgtgacccgaatgtcgtcgctgcaggagaattaaaccaatggatcgcgccaatatcattcatgacttgctgaactggatcgaaaaccacctggatcaaccgctgctgttggataacgtggcggcaaaatctggctactccaaatggcatctacaacgtatgttccgcagtaccactggccatgcgctcggcagctatatccgcgagcgccgtttgtccaaggccgcacaggcactacgcgctacccctcgcccaatactggatatcgccctgcagttccattttgattcccagccttcattttcccgggcctttaaaaagcagttcggtgaaacgccagcggtctatcgccgcacgccgcagcaagatgaagtggccctctcctcagagcacaactatcggcacagcacaccgagcctgcattcactgtacaagcgccaatgcgtagacgaaggctgcactaactgggtcggccagcgttaaaagcaaaaaggccaacgggtgtataaacccattggccttttcagctcccgctaaacgggcgcagcagcacctcacctcattgaactgagtgatgtcttatcagttatattcgagggtaaaggtggcaatcgatttgatggtaccgcccttcattttcgctgcagtctggtagtaacgcgccttgagcggcaaagtgatggtattggtctggttggcaatagtatgcccggcatacaccgccgtgccgctagtgattggcgttgagttattgccggtcagcagttggactccaacgccgctggcggcattgctatcctgtacaggctggagtacgcccggtgcattcgaggtatcgcgggtatagtcaaaacgtacgttcaccagcccctcccctgtaccaccaggcaacagctccgtccccgaaccaccgacgcagttgatattaatcgaaaagtcctgctctgcggcggtactgcccacgcctttaaacgccgcagtcgccaccgtactcaggttgatcaccttgtttttcgaaccggcgtccaccgaacaggacgaggtgacaatggtgatactgttcgccaatacgtgggagatcaggatcggtcttgaagggcccgtcccatccgcatagtaagatgaatactgcccgggggctaacgagccggtaccggtattctgggcaatcttgatcacctcaaccacaaaatacccctcagccagatacaccgcgccgttacggtagatctcatgcgggtaataggctccttcctgtgtgccgatctggcgataaagccgcaaccccacccccggcacgttggtggtccagattttgtcgctgatggagctcgggccgccttgtaaaatgcgaccgtacaacgtgctattaccgctgcaagaaatattgttatcccggctgatatcgaacttgccggtggccaggatatcgcccaccttggtatccggcgtaatcaataccctgccgacgttcataatgatgtcctgcggcctggtcgtattaactcgacattgagcatatgcctgttgcccggccaacatcagtaacaaaaacagcatggctgatttagggcgctggcgcatggcggtgaatttatggataacgttgatcatttgcagctcgcctcgataatttcgtaatcagtgctgttttgtgttttggcctggtagttcacggcacactgttgtgtcggctgagtaccccatttcaccaacagcagtccctgtaacgcttcggtacgcagatagatgcggctgccctggccgacgatgccgatcacctggttacgggtatccaatacttcggcaccaaaaggtaatgccgtgttgttcgggcccagcgcatggataatcagcgcctgacctttgatggtcttgaactccagcttggcaatcgcaccggcataaggtgctacctgctgactgctgctttccagctcgacatcgcgtgacatgccgttaggatccagcgtaacgttggtcatgcggtatggggcaacataaggcaccaccgcatagccgttgtcatcgattcgcaccccaggagagttggtgacgatcgcccctgcggcatccggcgcttcaaccagcaccatggtttggccacgctgaggcgtcatggtcacgccaccgccatgtgccaccacgctgccggaagccccgatggacgactgacggaaatcacggccatagctgtaagaaccgttcatggtggcgaaacgactacggtattccccactcacgctggtattggtcccgccgctctggtcgttagccaaagtggcgctgtagctgatgttgttatcttccccggtggagccgttaatcccgatgcggctgctgtcgtagccttggtcgttgtaggccaatgcgctgttcaggctgatgttttgcgagccaatgttgaacgggatcgagaagttcaggaagtaacgggtttcatcgtggttataagtatcggtagtacgcatggcggacaaaccgtaggtaactcggccgatgaagttgttgtaacccacctgatactgtttggaggtaccgccacggttccagtaatcgcgcaccgaaccggtgatatacagcgatcccagattggcacccaggccctgattcagcgtaagctgatattcactgcgctggcggttaaccgcatcggcacttaaaccccggctctcgttatcacgggcatacaccgcatcacgcagtgacaaatagccggaagtcgagtagcggtaagccgcaatggtgaagttggtgttggtttccgacatcagcttgctgtagctgatcttgtagctctggccggacagatcaccctgtttcaggcgggtgttagcctgagtcacgtcgacggcaaaagcccccaacggtgttgccactgcactccccagcagcaccgcgctgtaaccgtcactcacggtcgccccggtgtaaccagtcagaatattggtaaacccgcgctgataagtcgcctggaacatctcgggcaaggtatgtaaattatcatcgcgaacttggccagcggttaacgcatagcgctggatccccgggcgcaacatctgtgccaccgaagcatagggaacgctgaactggcgcacggaaccatcggcctcattgaccgtgacgtccagatcgccgccgtagcctgtcgggaacagatcgttaatcacgaactcgcccggcgctaccgtggtttgatagatcaactggttgttctggcgaacttccaccaaggcgttgctttgtgccacaccgcgcactacgggtgcatagccgttaagggaatccggcagcatgcgatcgtcggtactcagttgcgccccgcgaaaaccgatcgaatcaaagaagtccccgctggtaaacgcatcccccaaagtcagcatgccgcgcacacccggaatggcccgctgcgcataggtggccgtattctgccaatgggtgctttcctgactacgccagttcacattcgagtcatggcgcaactgccaaccggcaatattcaccccggcgttcatcgtcagataagcgttggtcgagtccgaattcccgccgctattggagctgtgcgaattaaaagcgttgaagttataggacagaaagcctgcggtgatgccgcgatcccagaatttcggatcgacataaccgcgtgcggtacgtcgcagcgcgacctgaggaacgctgacatccatacgcaaagtgctggtattgaggcggtaagacgcttccggcacccattcccccagcggcttacagctgctggtcgtcaccgccggatcgctgcccattgccgcagtatcgacgccaaactcttccagagacagcaggctaaagcaggtatcggcactgtctttacccggcacgctcttgaattcaatgttctttttacccttccattccccattgacgtagacatccagaaaattttcccccgccaataccgggttaccatcacgaaagcgcgaaagatccacgccttgtgcctggccaaccaggaaattgctgttgaaagtggcttcgaccggtgcagcggcctggttgacatcgctttgagccgctgccagcgaaaatgccggggtggtcaggcaaagggcacttccggtcaacagcaggatggatctgtaattgaaaagtgccgacttgacggcggcagagataggtaactcgttcatatccatgcattcctttaccaaattaagcgtccccgtcggctgacttcacatcgcggcatggggctttccaggagttacttttgctgatttttgctgcgttgaatccggccaccaaagtcattgatggtggtgtactcaatatcagcgatctgtgaactatcaccggaaaaggccagcgttttttcctggccaggcgccagcatgtcgccatgcggtgccaacgtgactttcttacggttgacaacggcattgatttcggtgaaggagacataaaacggcgtgggatttttcactttcacaccgccagccacgaagttccactgcagtttttctggcgcgtcattggctacgccgctcaggccttccgggcgatagaacaacttcacacgggttctgaaggccacctgcaggaagttttctggcgtagtgtcggcggccgttccggtcggtgccgggggaatttccagcacgttcaaccagaacagagattctttgtcctgcgtcaacgccgaagtcgtcagcgaaacgcgcagcgcctggccaccgtttggctcaatgcggctgataggaggcgaaataataaagggagctttgctgttttctggcgtcgtttccgcgttgccctcatcgatccaggcctggatcagcgccggggcggtcccattattggataattggacggtcacttcccgctgtttggccggataaataacgcgtgtaccgttcacaataacgctggcaaaagcgctgctgctgaaaagcacggccatcagcaatacgctgtatttcttaatcgatgttttcattttaatatcactactatagaaatacagcgggggaaaagtttccacccgccagaatagatacccgatgattttcactccctgcaattagaagctatcagggcgaaactattcgccccgaaaggtcacagggaggaagcaacatttaactagaaaaggaacgggtaataatttattggtagatgatggtgtattgtacgttagaggtcacatcaccagcccccgccgctgcggttgcgaaatattcagcgtagtagttcaggtcagctgaatcaccttcattggccacggtaacccactgggagttagtctgtgcaccgttgttggtggcagccagaattggcaggaactggttgttgctacccagcagctggatttgcacgttggtcgcagcattggttttggtttggttattcaaacgacccgttttgaaatcaacggttgaacctggttcgaaataggttgctacctggcctttagagcatttggtcaggttaattgcgaatggagtacgacccgcagtagcgctaaccgcattcagggtagaagaagatacggttggcagggtaacggtaaaatctttaccacccggggtgcttatagtacaggtctggtcggtcactttaccgttgaaagtaatagtaccatcggcagcctgtgctgaaagagaaggaatggcggtggcgcatacagtcagtgctaatacagcagacagcttagagattttcatattttcgactctcggtgaattaatacatccgttaagtacattcaacgatgctactccctgtcaggaatgaagcccgatgaatccattgcccggcgaaatatagtccaagaacattctcattgataaatcgtttaaaacattcataacgcccctcatgataggaaaaaactatcaacaaatacctatcgatcgatgttgacgatttacccagttcgtaataatcttaattcgtcaaggttagcggtcaaaaaattcgataaaacgccaaaaaaccagaatataactctgttattgcgcttttagccatcttgagcgcaaccgtgttccctctgaaatttcaatcttttagaggaatttaccaccaggtaagatgattctttctttaataagattattaccaataaacagtcatttatttcttagtttattgtttaaaatcatacagataaatttcaatcaaaggattgaggaatgcgcagcgtttttaacggtaaaaataacggaattaattatgttttccagcccatgttcgccaaatctgggcaactgctggccgttgaatgtttatcgcgcttctctttcgatagcaaatttgcgcatttctctccggaacaattcttccaacaggccgatcgcgaaacccgcgtcgagatcctgcatcaacaaattgaattgatagaaaaataccgtgactggtttcaacaacaccagatcattgccaccatcaatgtcgacgaccattcgctgcaggagctggcgaacggtgcgttggccgataaaatccgcgcgatgaattgcctgcatttcgaaatcaacgaaaacgccagcaggctggtaaaaaatcgcgtccataacgacccctctctgaataattattcattttggctcgatgattttggttctggctatgccgggttttccgccttgtataacagccgtttccgcttcgttaaactcgatcgacagctgctgtgggactttatgaaaaagcccggtggcgatgggttgatgcgtgccttgttgcgtttttttcacctgaatcattaccgggtgattatcgaaggggttgaaacgcgcgaacaaaaaaaatggctggacgaaatgccctactatgcactgcaggggaagctgtggcaggaatccagcatcaaagatttaaatcagctgcttgctgctgaatacttttaactcattatgggtatccccaatatgtctaaaaacaatgtcctggtgattagtgagtgtaagtacagctatgtcgggctttcaatgctgttgaaaaagcattatggcaagtacgatatcaagctgttttcggactttatgcacggtggcgcaaaggcggagaaaattatcaagcatgatattgcgttgattttcacctcgcaaaatctggagcaaagcgtcaacgtgatcgaaagcctggtgtctgtgcatcagcaacacatgagctcaacgcgtattctggtgttttatgatgatgagcgggtggccaagctgttggcgatcctggggatctctgtagaactggtatcggctcgcatgccgctttatttactagaggaaaaagtggaaaacctgctggcgagcgaagagtcggggcaattgaaggtgcagaaaacccgcgagctcagcccggcagaaagcgatgtgatcttcaacctgttgcgcggcgatagtctactgaacattgcagccaagcgaggcacccatccgaaaactattttttcacagaaatacagtgcattgaagaaattgcgtctgcgaaatatgagcactattttcgtcaccaacggctgactcaggcgagtatagtaaaggggcgagttcatcgattgaacgtcgcccctcgtcgatataccaccatgccctctcccgattatttatacaaatccgcggtgccgtaaacgtggttattaacggtaaccgaagtaatgcgataagcactagccccctgccgttgcgcatcggcggcgatcgcctgttcaaagctgctcaacgttgtcgtctggctggaaacctctccgattttttgcagcccttgtgcagcactgcttgttaccggcatggccgccatgacaccgctgctggctgcagccagcaccaaagccaaaattacagttttcatcataaaatcctctcactagcttggtgataaccggcagcaaaagccgccggagggattatgcctttactgactcattgcgtctttcttcatgccatctttagccatagagtctttcttcatgctgtctttggccatgtgatccttcttcatgccgtctttggccatagagtccttcttcatgcaatttttatccatgcactcttttttcattccctgttttgccatcccgtcgtgggacatctggctcataccgtcctttttcatcgcgtccttgcccatgctatcggccgcattggctccggtgatacccagcatcagcgcgctacacatcatcatggcaaataactttttcatggtattccttttcttggttaatcggcacgcgtcgtgccatgaaactgcaccggcggcaatcaactaccgccaaaccagttgtagccttggtcttcccaataaccgccgggaaagtggttggtaacttcgatcacttgaatatgtttgggattcttgtaacccagcttggtgggcatccgcagtttcatcggatagccgtatttacgcggtaaaatctgcccgtcgtaggttagcgccatcagcgtttgcggatgcaacgccgtggccatatctatgctggtgtaatagtcatcagcacatttaaaaccgatatagcgggcgttcagatccgcaccaatcgccttcaggaaggtggcaaacggcaccccaccccatttgccgatggcgctccagccttccacgcagatgtgccttgtgatctggctgatttgcgtcatctgatgcagttgtgccaacgtccagggctgcttgtgcagcaccaaccccgccacttccagccgatagtncccacccccgccacttccagccgatagtntcccagccgatagtcatcaccattgatatccggcgcctgatcctcgctatagaaagcattgaacgggaatgggcgagtgatcatcgattcggcatactctggtgccagatgattggcattgaacagccagccctgaacccgatcgttaaagcgtgagatgcggctcaaggcctgatctacctgagtgttatcgctgagatcgcagccagtcagcatcgccacgccccccagggtcaagccattgcgcagaaaacggcggcgcgacgacgatgccaactggcgcgctagcaggcgctgtgcctctttaacgatatcctggccttcgctcaggctgagagggggtttttccattttcatctgtgtctccttagcgcccacgtaacatggccagcagcgtacgtggcaccagggccaccattaccagatggatcaccacgaaaccaaccagcgtcgtcatggcaaaaaagtgaacatagcgagccgtgtcgtaacctccaagcaaggtgcgaagcagaggaaactgcaccgatttccacaacaccagcccagaaagcaccatcaggacgctgactgcgatggccaccagataggccacacgctgtaccatgttgtagtggcgtggatcggcgtgtgacaacttgcctcgtagtgcggcccatagatcggccacaaacttcctggggctgagcggccagaattggcgtttaaagcggccgctgaacaggttgatcagcagatagcacaggccgttgatgccaaacagccacataccggcaaaatgccattgcagcgcgccccccagccaaccgcctaacgtcagctcattgataaagctaaagttaaacaacggggaagcgttataaatgcgccaaccgctggtgaccataatcaacatggcaagtgcgttcagccagtgtgtcagccttagccacagcgggtggataagggtctgtttcgccgtgatcatcgcttctctcctgccccgtatcggttcgatgtcagcagtattcaacggatttgttccccaagacctcacgcaaagttaaataaaatgtgatcacttccagggtgggggttgtgtagacttcaggtagaccagttaactgcggtagagaaaatggaaaaggcaaaacgaattttgatcgtcgaagacgacggccatatcgccgaactgttgcaactgcatctgcgcgatgagggctatgacatcagccacgcggccgatggcaatctgggcatggcaatgctggaacaaggaggttgggacgcgctgatcctcgatctgatgctgccgggcatcgatggcctggaaatctgccgtcgcgcccgcaatatgacgcgctatacgccaatcattatcaccagcgcccgctctagtgaagtccaccgggtactcgggttggaactgggggctgacgactatttggctaaacccttttccatgctggagctggtcgcccgcgtaaaagccctgttccgccgccaagaggcgatgacccgtaacctccggatggaggcaggaacgttaagcatgaacgggctggtgatagatcccatcgctcgcgaggtttttctaaaccagcaaacggtggaactgacaccgcgcgagttcgacctgctgtattttttcgcccgccaccctggcaaagtattttcccgcctcagcctgctcaatcaggtctggggctatcaacatgaagggtatgaacacacggtgaatacccacattaaccggctacggatcaaaattgagcgcaacccggcagaacccgagcacatcctcaccgtgtggggcatgggctataaattcgcggcttcgccgcaagggtaaatgatgaaaaatctcacgctgacacaacgcctgactctggttttcgccctgctgctgctgatctgttgttcgatttccggttggttacaggtgcgcagcagcacgcaatatagccaggcggtgatccaacggctttccaccaatctggcgcagcatatcgccaccagcaacccactgttgagttcgcagggctggaacgatcggtcggtgcataccctgttcgatcaactgatggcggttaatccgagcgttgaggtttatctgctggataaacaaggcaatatcgttggcaatgcggcacctgccgggcacatgaaacgccaaaaggtcgacctgttgccgatacagacattgttgaacggggccgaaatgcccctctatggtgacgacccgcgtaatctcaataatcaaaaagtcttcagcgccgcgccgctgcgggtaaatggtgagattgaaggctatctctacgtagtgctgctgggggaggattatgatgcgctggccaatagcgcccaaatcaactctgccatttataccgcgctgtggtcgatggggctggtggcgctgttcgggctgctggccggtggcattgctttccactgggtgacacggccgatccgccgcctgactcagcaggttaatgcgctggatagcgatggcatcgcagcactgcaagcctatgccaatacccctgcagagagccaccgccgtgatgaggtcagccagttacagcaggcattccgccgtatggcacagcgcattactgaacaatggcaaaccctgtcacaacaggaccagcaacggcgcgagtttatcgccaatatctctcacgatctgcgtactccactaacctctctgcatggttatctggaaacgctgtcggtgaaatcagccagcctgacacccaccgatcgtcaacgctacctggagatcgccctggctcagagccgcaaagtcgggcggctggcgcaagagctatttgagctggccaggcttgagtacggcgtagtgaaacctcagaaagaaccgttctccctcagtgaattggtgcaggacgtattccagaagttcgaattggccgccgaggctcgccagcagcgcctgcttgccgatattcagccgggcatcccccaggtgtttgccgacttgagcatgatggaacgggtgctgaccaacctgctggataacgcgatccgccatacgccaagcggtggagagatcgaagtgcgcctgtggccacagggtaataaggtgatggttcaggtcaatgacagcgggcctggcattcccttggagctgcggcctgatttgtttatccgcccgtcaattctcaaccatgcccgccgccatgcgggaggtttggggctgatgattgtcaaacgcattctgcagttacacgacagtgacattatgctggtggatcagcagcatgctggagcctgctttcgtttctccgtgtcggtactatgacccgacagccagtccccatggaagggcttagggcgtatcagcgccctgtatgattgccacctgttgccctcttcggcacagcgatttaattgagcaactcataataggataaggcccctaatgtcggcactttaacgacttcattggctggctcaccaaactctcgctcttggcctatctcgtcattgaccacgttgacctgatagggaatgagattggggataatggcataaccacggctgtcggtaaccacatcaacctgctcagggatcgtcgcattgggatactttttgctatataccagtgcgttagtgtcacctaacgttggccctaaggtgatccccgcctgatgggcaaccaacgaacctgagctgttcgccgagtagagcgcatagtttgttccagactggtatctgatagccgattcccccgcagcatagcggtaattggcattcgcctgataatttgccttgctcttttttcccctgcggctagtcacccggtagttaaggttgttatttaaatgtctaccgctgacgccaagttccgtttgatagtgatcgtaggggttatagctgtatcccagattcaggctggtgttatcaatccccatgctctttaagggtaccctgaaggtaataccaaagagcatttcatttttttgcgtaggatattgatagtatgtcaggtcaagatcataggataagttgacggtgttttgcataaacttcagtgagtagaacgtccgcttgccttgatcttctttgtatttttcctggttaatacttaacgataagctctgtgaggtgccgatcaatgcacttagcgaaaaatcaaaaccatattcctttttatagtaatcacagcaatagtaatctgttttagcattataggagtaattattgaaatcattaaaatgaggttgtagataatactcgccatttaacctgatgctggcattcgccttgttgaaattagccacatagtgtaaacgcaacctttcaccggttacctttccctgctctgccgatgttatactgctgtactggtgattaaaggtaacatcaccgaattgattgagtcgctgaccaatacctagtgagtggctatagtaattttgcgctatcaacgcgccaccaaataaagagctttgtgcagtgagtccatacccagcgccaccctgaaaaaaattgggattagactcctccattctctcactactcataaacttgccgaatgagatatcatatttccacctattcttatccaggatattgtcaagtcgactccagggtacgtcataataaatgatactcccgtcgctttctctcaccgtcatggtaatagaacccgacttgtcaaacagtttgatatttctcagcacgaagtccccggattgaaccatcgttcgataaaccggtttgccgttctgccggatctcaacttcagcatcactggtggccacaccgtatacccaaggcaacaccggcccctgtgtcgaaggaaacatattatcgtccgaggacaattttatcccgcgataaggaaagggatccagatagaaagtattattgtaaccctcaccaaaatgcaggcgagaatttatcacggagatgtctctttcagcgtagagatcggaaaattttatccgttgctgtggcataccttcattatcatgaaactgccgtgatcttaaccgccagtgttgatagttgatacctgactctaactccaccaccacgttatcttttcttttcctcctgacataacgctcgccctgatatttcttatagttaatatcatagtttatcaaaatggctggaataccttcatctctatactcgatagccaggcgaggatcggccttaacctccgtcgactccaagaatgtaaaaatgagaaaattcaccttatcaattaaggtaacggtaatatttaatggataaagatctttaactttgatacagccggtttctggtacctcactgctgtttgcgggtgagaggatgtgccattctataagcttttgtctatcaaaacacggaaaaccgtcgtccgccacgtccaattcaatatgacctatatcccgctctccttcggatatataaaaatactcccctgcattggcaaaacaggctgccattaatagaatagggaaaacgaataagtttttattcatattgcgcggatggaaataatgggatttataaaaatgcaccggcagtcatcattaaacataccggtacattattatttaattagaacaggttacttaccttcgacagaaggcaggatcgcatctaatttatcaagctcacgcatcatagcacgataaacatagagtttggactgagcatggcgcccatccaatttgtttgctgcggcaagatcacgaagctttttaaccaatttcagggtattgggttggttggcatcagccttaggaatggcgctatattctgcaaagagatcctgccactcggcttcccaagcctcttgctggttgtaccctggggtgattgcagttctggttttagcggcaacggatccgcaatatttatgcgcaccaccgcgggtgccgtaaataacccagagaggtgatttatcccgaggatcattgccatatgactggatatcactgacgcacttggtgacttcattacgcatattttgctcttggctgctgataccagcaaaaacattcgcagagaacgccagagtaccgagcatcaaaagcccaattttgcttttattcatctatatagatccttctagaataattaattaaaaacatgaatacgccgttcttaaaggcaaaaggaccttaatttatagcatttattaagacaataaaattcagctgaaatgttttactttcagatctttcatgagaaattctttaacatagccagttaattctcaaataaacactggagatgataatattatcatgctattaattacaccaagatcgaacgttttataaccaactgtaatgtaaaacagcgacctggttcgcttacaagtgacctatatcattaagaaagcgtctgagattcagaataaatccagacaaaggcgacctgactaattttagccaggccgactgacagaggaattgtttgaactcacacagctggcgtaaactcagaaggagtccttctttcctagtgcggtgatgccggatgtattccaaaaatggcagtttcatcccagtaacgggttctgaacgccaacagcagctgcataaagccaaccggattcagccccagcttgcgcataatattcagcttatgggtgcaaacggtcttatagctccggccaataacctgagcggcatgttgcgcattagctccggaaaccatcaaccccaaaatgcgccattcacacgctgataatggcagctgtctctgcgacaatagctgccgcatcgttgggctacgaaaactggccgtgggatgggccgccgaaatggcggccagcaaataattcaccttatcacgcttggctactaatgagaggtgtttttgcgccgcaagcagcgataaaatatccgggttgccgaggtcggtgaaaaccaccaaggacgcctttggccaaagcttaccggcggtcaacacaaatcgcaccacctgataaatgtcttcggtataatggtagagctccataataaccgtttgctgttcattactgttgagtgatgaaacaatctcgttcagactacttagacggctgatttttttatttttcgggtcaatcaatgactgcagaccgatattgaccaaaggatggggatcaaagataataaaagtatcgttataaaaggtatgcataatcaactattccattgaaatattttattttttagcttatagaaaccacctgaaacctgcgttccctgccgaacggtcaataaaaaccagctatttaagtgcaacttttatccacgttgataaacttatcgttataaataataaacttctgcccctgcaatttgatgcccggatgcgacagcgtatccccagggcgtaaatactcggtgatcccctcttcatcggtgctatcacagccaggtttcaacagaaacttaaaaaaggtattaccggtgtttttgagcgttccgcgctgcttgtcaagctggtagtcaaacttgctcacacgcggtctgaccaccagaatggtatccataaccacgatcggctccaggttggcaccggctttcttgttctgcccagccgtcagcaggttagtcggtacctcgcgaaatgagacgcgataataacgctctttattatccttcggcccatggtaatagaacttgtaatattccccctgccctgcccgcagtgtcagttgcttaggggcaaacagcaattcaccctctgccgggcgggttcgcacctcttgctcccctggccgatcgatggcacgaatggaaacctgataaaaccgggcgctggcgttattgttcaacacccgcttggcgacaaaggactgctcctgatccatcgcaaacgtcatggtacccacgttgatcgccccggcggtaaagggcaggaatattagccatagcagcagagttttcacattaccccccctttaattgatattgcgccaggttgcctcaacgtgaatttcaccggcggcatgcacatcgccataccaggcgttaccttccaccgttttcagcgagatcggcgcgttcatcgggatcctgaacttgaccttggtcttgttcatcacccccacgtcaccggaaatatcgttccatggggtactgctccacagagcgttggtcatatcgtgccactggctgtcacaacctgcatcaaacacctgctcagtccccgtgctggtggtgatactgagctgagccgggaagggtacctgcgcggtattatctggcgaggagaaaatgcagtagttgatccctcccagtgactgagttggaccggtcgccatcaccctgacctgatcggcattggtcttggcgctggtggtcacaatatagccaaactccaacggtggctctgaggggccaacatagccttcccggtgcgggctgttatcgaaatcctcggaaataatgctgatactgaaatcacgaggcttgatgatcagttggttagaggtcgagaactcataccagcccgattccggcgaagtggtgttctggaaacggaagttaatcagatcgtgcgtaccgccgtcggtgatccccagcctgaccatctgtttgaagaaattactggcaaaaaacacgtaaacggcattgctgctcttcaactcgttaaacgtatagtagctgccggtacccgaggtatttttccaactgttgccattcaaactgaattgcagatcggccgcattaaccgccgatgacagtgcggcatggttgatcgacggaaaaatatggatcgaggtgttactgacgctgccatccgtttgcagatcgtagctgaccatcttgcacatgataccgctgcgggcaccgacggtttggttgcggcagtccgcattaccttcaccgatgatcggtatcccatcactgttgacgaacacttccgataccgcattggtattgataaaacgcaggtgtgccgccttggcatgggtgacggtacgtcgataccaggtacctgagctttgatccttgcagcgttggccactgctggcactgtagaccgcagaagtctgacagccgttgatttgcatgctgaatgactcaccagcccccatctgcttgagatactgataaaaactcggtgacatcatgccgtgcatccatttttgattcccgggagtaacaaccgccccatagaaccctttttcatcggtggtctctggcaggatcagactggtttccatattgcaaccggtataccagttgatacagcgcaggccaagaaatggatttttgatcggcgcattttccagccacatatcgtaacgccagttagctatcagaccatagttgaaaccattatcgacgtagcccaggctctgttgataaatggtgccggatccgccatatttcaggccggtccatttattggctccggtcatacgcggatctagcccccctgccggggtcacaaagaagttatcgtccgcattgttttcaacaaagacaaacttcatcgtggcggcatctcccagattggtcgggttcaccgcctgcgccggggcgatgctcagcaggccgccgatcaacaacgccaaacgtatgctattagccttcattgctcatatctcctggttggcccactttggcgtaggacttcaagccgcggcaaaccacgtcgccgacccagaccgcaccctgtgccttgctcagatccagtgccacctcacagctttgattgtgacggtaggtaaaatcgattaccgggaatttcttgtccacatccatcacgaactcccctttttcatccgtacgggtacgcccgatatggttgttgatattggcgttggccagcagcgtaccgtcctcggccttgatgcggccaaataccgtcaccatctgcttgatttgcggttcgatgaccgccacgttgcccgggtacagcgtcaggctgttcttacggttggtgacgatgtcgaaactttccgccgagtttttgttgttcatcaactccaccacatactgaccataaggggacagtggcagatagttcttgtctccggtcagcttgacgacgcggccatccacgcgcgcggtcagcatgccttcattttccaggccggtattgataatgatccctgagttaccttcattacgcccacttgccgcgatatgacgcccctgccaaccgacgctaccgttagcggtcaggctggtattcacataaccgtctgcggagctgctaacgttgacggtgccggtagaatacttggtgtcaaaacgggcgtaggcaccgccgttaacgctgttatcaccgttggtgtccccggagatggcgcgcgacatattggcccccacggtacggatcggcccatcggcaatctctttacgcgccgcaatattggccgtggtgtagccgttctggttagaaaccccggcgctgaaccagttgcccagcggcaaggagaaatcgagcgcaatgtacttaccggtattgccgccggaatgaccattattgtatcgctgtaccccggcacgtatgcccagcgtgccgtaacggccggtgaacagattctggtagtaatccacgttgtagtaatggctgctatttttcttgtcgtcgttataactgacgctgagcgtgccgaggtgaggcacaatcgcccccaggttcagcgagccgccgatcgcccggttatgggcatcgttttggcgcagtttgttgccgatcaccgttttttcttcgttggcccacagcgtactgaaaccgccgggcagcgtggcgctcacggtgttgatcagcgtccaggatcggtctgtggctaccatgctctgggtgctaacctgcaccgcatcgatgatcggtatgcttaaacggccttccgccaccgaggtgctgtccagagaataaccggaaagcgcccagttaaaacgagacaggtagccagaggctgaagcccccaacaggtagctatctttagcctcagcgaagcgatcgttgtcgccacgccactcatccattcgcaccatgccgccccaatactgccagaacattggcgcacccgcggcgtgcaacggactatagagtttgttaacccgttgcatacggcggttgatcacctgaccattgacgatcacctcaacctgcacatcgtaaataccaaaaggcagcgtgccggtatccacttcatggttacccatggcgaaattctgtacgctgagcaggcggccatcacgcgacaggtgaacctcacccgccgaaggaaagaaggcaacaatcggcgttaacgactgggtattatcaaacaccgtcgaattggcccggctaccataggacatgccgtagattttgctcgaattgatggtggtcactgggcccagcgattgcaggttccaactgtcgagcatgcctgcggcaaagcgtcggccagcgaagtcacgctcatacatcaccttatacagcgtcgaatcctggttgctgctgccaatcccatagacagaaccgttcacttccacatgatgttcacgcagagaggtgacgttattcagcgataaatagctggaggtaaaaccttcgctggctttggtgcggttgtcgtaaacgcccaggttataggccagcgtgctgcttatctcatcaacactcgacgcaccaatatcgctggcgcgctcacgcaataccgtacccagggccgattgcttcaccaccaattgcaagttcaactggcggaaatccaatgccagccaggcatcatccgacagcgtaatgcgttgcttatcgtcaaagttggcgtcattgagcgcattgagctgcttggcgatcgcggcggtcagctgtgcgcccccctcgttatcttccagggtaatttcgctaattttcagatgattatcatcaagcaccagcagtgcgcgcccaatgcgttgatcgtctttctgggtgctgttttgttcaaaatgcagcaatagcgggatgctcatcccctcacgcaatgccatgctgaaagtctgggggatcaacacgccatcaatttgggttagcccggcggcaagagccgactgcccagggatcatcacggcagggataacgctcatccccaccgctactgatattttgagtaatgcactatccagtgctagtttcacgtctaactccttgaactattatgcatccctttactgcaacatcccgtggcagcccaactcggtgttatttgacttgaataaattgctctccataccaaagcgcaacgtggcttttcttatcattgatatccactttggacaggccacgatctttacctggcatgacaaaatagttttccttgcagttgctgccttctttcttattcttgcagggaccataggccaccattttgaaggtagcattgccggtattgacgactttgttattggcaaactgatgattaaaattagcctgccggggcgtaaccactaaaatggtgccaatacgcgccgaggtggtggccacgccattgcgtttggcggtattctgccccgcatccgttaatgcctgatcgaaccagacaatccggtaatagcgttcttggttatcttctgggcccttataataaaaacggatcacgtccctggcgttggctggcatcatcaggctggccggtgacaacagcatttcgtctttcgtcgccatcgggatcaccacgccggattccgtcgggtcggaaatcctttctatttttatattcaccaggcggccgctatccgtcgtatttttaatttctttacttagcgtcgcgctattactgggcataaaggaactgaccgagccaacatccagcgccaaggcgctatggcacagggaaagcaacaggggaatagaaaaatagaaacgattcatagcggtattccaaactctttagctgacaaaaacagggggtttcccccctgttaagacgcattactctggggaaacgattatgcggtagtccaggtagcgttgaactctacgctcacgtcgccactccagataccttcaggcagggtgctgaaatcagtcacagcagttgtgccatcagccgttgcgccgatgatgctgaaagtgaactgatcttgtgcactggtacgaacagctttatcgtaagcgccagacagtgcgctcaggttgccacccaaaataccggctttaacatcgatcataggggtttgagcggttttctctacggcagcaccgttatagttaacgcccacttccagggtagaaccagaggtgtcgagctgagtcagagtgttggataccagcttggaggtcagtttaaaatcggtggcggttccttcgccctcgatagtcacgtcgaacaaacctttctggctgttgaagcctttgatgccttcagcatactggaaagacaggctgccgattggcgtaacaaccaacttgctggtggtatctttcttggcagtggctgaccaggtagccaaggcttgtgcggtaacttctgctgcctgagcggtgcccactactgcgaatgctgaaacgattgccagagcaagtgtgatctttttcatggtaaaactccctaagttatagatttctattgtccgttaaatttgccttgctttgtcatctccactcactctggtattgccagttgctagcgggataacgccaagtgttgataggcaacgtgagtatgcctctcgtcccacttggcgagaaaaatcttaacccaaataaatcttaagataatcattaactagtaaatgtgaaatgtttagatttaaatcctgcgtttaatctttttaatgctgaattaaggataaaaactccacccatgcaaagtgggtagcagaattatcctagattaattcgaccaaacattaaccttattataactaccgttattcggtgccctttctggtgaaaagttagcctgtacatttaatgtgtgtcagttaaggcacccatttcccc

SEQ ID NO: 302 - DNA, 61535 bp, unknown
  Altogen  635822 strain
  misc_feature (25300)..(25300): n is a, c, g, or t
  misc_feature (39664)..(39664): n is a, c, g, or t
  misc_feature (60875)..(60910): n is a, c, g, or t
  misc_feature (61007)..(61029): n is a, c, g, or t
  misc_feature (61384)..(61437): n is a, c, g, or t
cctccagggcgcggccgacgctggccgtttgagcagatttgcgcgctgttacgtcaactgattaagcattcgccaagcgatttcggttatcagcgttctcgttggagcactgagctgttagcaataaaaatcaatgagataacaggctgcactttgcacgcgtcgacggttcgtcgctggcttccctctgctggattggtctggcgaagagcggtaccaacactgcgtattcgggacccacataaagaagagaaaatggccgttatcgccgaggctcttgcccagtgcagcgctgagcatcccgtattttacgaggatgaagtggatatccacctcaacccaaaaattggtgccgactggcaacttcgtggccaacagaaacaggttgttacgccggggcaaaacgaaaaatattatctggctggtgcattgcacagcagcacgggaaaagtcagttacgtcggcggcagcagcaaaaaatcgggcttatttatcagcttgttgaaacaccttaagggcacgtatcggcgggcaaaaagcatcacgctgatcgttgataactacatcatccataaaagtcgcgaaacgcttcggtggttgaagaagaaccccaaatttattgttatttatcaaccggtctacacgccatgggtgaaccacgttgaacggttatggcaggcattacatgacacgataacccggaatcatagctgccgttcgatgtggcaattgctgaaaaaggtacgtcactttatgaaaacagtaagcccattcccaggcaggaagcacggtcaggcaaaagtgtagcagtattaggatcagctatttagggggcagaaaaaagccccgcaaaaaatgaggggcaaacacaacaacaccagggaaatcgttgatgattaatctgctattactatatgttttttgagacgagagttcatcaataaattgctgcattattgcaacattatagttaattaatttgtatgtatttggctttattcatacgttttgtgaatttgttcgctatttgtgagcaataagtcggcatgctggttattttttgttgaattgatacctttgggggtgatttcttgcgccatcacccctctccaaacggaatgtgacttgaatcacattaggcagatcccctatattccccacccatagcgatgttgtcgtattgcgatgcagcggcgcagagagttttacatttatccggagttgttgatggagttaactacgcttttgctttacgtgattgccgtcagtgcggtgatggtgacgcctggcccttccatgctgttggcgctaaacaatggtgcaattcacggtatgcgtattgccagttatggtttcctgggggcggtattggccgatctgttgctgatcggcgccgtcggttgcgggctaggggcgttgttgcaggcctctgagcagctgtttgccgtggtgaagtggggtggtgcgttatatctggtctacctggcctgggtgctgtggcgagcgccggtaaaggctttagcggtaagcgctagcgccgccgcagcgaccgggaaaacggcattcctgcgttccctgatggtcggtttgtccaaccctaagggcctgctgtttttctcggcctttctgccgcagtttattcagccagaaaagccgatcgccatgcaatacctgatcctggcattggtcagcgcgatgatcgactgcgtgatgatgacgatctatgcctacggcggtcgccatgcgatgcgtaaattctcggcgaacgtgatgcgctgggtaaaccgtagctgtgccggcatgcttggcgtgttggccgtaggtgttgcgctttatcggcgtagcgatgtgagctagagcctgtcggttgaatcagcgggcgcagcatgctgcgccgctacttggcgagaatgtctacagtttcagggagctaaccagctccctttttaataggtgactgcctgtgttagcaaaagaagaaagcttaggcatatgacctactgacggatctgcagttaactcgcaacccggattgttccacgtcatagcggtatagttcgcatctgattggtagtagtgctggtagatgtgaaatatatgcaccacggtagtcaccgttaatataatcaccagcgcaattaaaacgtaagtgattttaactttgctcagaaagttctttttctctttacgaggtaattcaggttcaccctgattaattgcgatctcttcaatggcgacatcactggcaattcttaaccctacttttggtatggtttctatgatgtttttatcaatacccatgctcttgataatccgccgtagcgtgctcaggcattggttgagattattattgctggcctgtaggccgtaatcatcccacactttttgcagaagcacttctctctcaacaatttctcctttatttttaataagaaaggagaaaagtcgagctgcagacgaggaaatggtgacgatttcttcctgaacttcctgatgataaaaaccgacgctattcgggcagaaaaggacatctccttcgatgaggtattgtggttttgtcatgttgattcactccatgtcagacagtgtaattaacttaattaacgttaatcctaagtctcataatattgttttttcggcggtagggcaacaaataaacaatataaaatatagtgtaatcaacaaaattcagtttaaaatccgctctatttcatcacggcagttattaatattaagtaaatggcctgtaaaatattaaacggtatttaataaaaattaagatcgctaacttactgataattttgctaaacaaaggttctaactagtccgacctgtaagaatcagcctagttagaaaaatgtatcaatttaagtagcagatttgtgcggaggcagcgttgaattaaaccccaattcgatcgcgcagggtgtagtaggcagcgccgatggcggtgaaggggatttgcaggttacggccgccaaagaacggtaggtgcggcagtttggcaaaggcgtcaaaacgttctgcatcgccacgcatcagttctgctatcagcttgcccgccagatgagtgcaggtcacgccgtgcccgctgtagccttgcatgtagtagacgttgttttccaaccggccaaactgcggcatgcgcgatagcgtcagcaagaaattgccggtccagcggtaatcaatgcgtacgcctttcaactgcgggaaagttttcagcagtttagggcggatcaggttatcgatatcatcgggatcgcgggcgccatataccacgccaccgccatacagcaaccggttatcgccggttaaacggtaataatccagcaggtaattgcaatcttccacgcaatagttttgtgggatcagtgaggctgccacttctggagccaagggctcggtggtgaccacttgagtcccgcacggcatactgcgcttggccaaccttggctccagtttatcgcccagataagcatttccagctacgatcacgtaacgagcggtgacttggccgttggcggtgctgaccaccgctggttctccgtgacggatattggtgactgcggactgttcgaatatccgtcctccttgcaggcgaatggcctcggcctcgcccaatgccaggttgagtggatgaatatggccgccactgtgatcgagtaatgcgccaacgtaacgatcgctgctgacctcctggcggatacggtcagcatccagcagttcaagttgcgtattgccgtaacgctcccagtgctgcttttgatcgatcagcgcgtggtactgtttattgttcagcgcggcgaagatcccgccggggcgatagtcacagtcaatggcatagcgtttgatgcggctgcggataatctctgcgccttcaaacatcatgctaccaagcaccttggcgctttctgcaccgtaacggctttcgatcacatcgatgtcacggctgtaggagttgaccagttggccaccgttgcggccactggcaccaaagccgatgcgggcagactccagcagcaccacgttataaccggcttcaaccaggaacagcgccgatgacaggccggtatagccgccccccacgatacagacgtcacagtcgatcgattcattcaactgcggataaggctgatggtcattggccgttgccgcgtagtagctttttacgtgttcagtcatcatcaaatccttattccagtgaaatccaggtggttttcagttcggtaaatttatccagcgcatgcagcgacttatcacggccgttaccgctttgcttgtagccgccgaatggtacggtcatatcgccatcgttatagttgttgacgaacacggtgcctgctttcaactggcgggccatgcggtgtgcccgtgacagatcgcgggtccagacggccgcgccaagcccgtattcgctgtcgttggccaatgtgagtgcctgttgctcaccgttgaaggtcgtgacggccaagacagggccaaaaatctcgtcccgagcgatgtgcatcgcgttatccacctgagtgagaatggtagggccgagatagccgtgatgctcgccttgcggatgggcacgtccatcaaggaacagcgaggctccctggttcaaaccctgttcgatatagctggtgactttttcacagtgctgttggtcgatcagcgtacccatgagcgtttgcggatcgagcgggttgcccggtgtgaaggcctttgcatgccgctgcaatgcttgtaaaaaggcctgctgaatactttcctctaccagcagccgcgtaccggcaatgcacacctggccctggttatagaagatcccggccgccgctccctgcgccgccttatccaggtccgggcagtcggcgaagataatgttggcactcttgccaccggcctccagccacacgcgtttcatgttggattcaccggcgtacttcatcaactgcttggctacctgggtagagccggtaaaggcgagagcatccacgtcgttatgcagtgccaacgtcttgcccgcatcgtggccgaaaccaggaataatgttcaggacgccatccggtaatcctgcctgctgtgccaaagcgccaagataaaccgccgtaagcggtgatttttccgagggtttcagcactacgctgttcccggccgccagcgccgggcctaacttccagcaggctaacagcagcggaaagttccacggtacgatggcacccaccacgccgattggctcccgctggatcagggcgagcgcatcatggccggttggggcaatttcgccatacaccttgtcgatagcttctgcataccagcggatacagcggatcgcccctggaatatcatcgcgcaggctatggcggatgggtttgccggtatctaacgtttccaacaacgctaattgctcgctgtgctcttccatcaggttagcgagtttgaacaatgttgccttgcgtttggcaggggaggcttgcgaccagtcgccgcgttcaaacacctcgcgcgccgccttgacggccaaatcgatatcgatgtggctgccacgggccatttgtaccagttcgcgaaccccggcaggatcctgaacgctaaaggtttccccttcggctgccgggaggtagcggccattgataaacaaccggttttcaatcttcagggcctgtgcccgttgttgccaatattccaggtggtggaagtccataccttgctccgttaatcagaatgtcgtcggcgtatgtgcgctgataattcggcaaatgcgcgccgaagtgttgctgaaactatgggggatcgcggtgttgatggcgtagctctggcctgcccgtaggtgatagctttgcccgttgacctgcagcatcacttcgccttccagcagggtgccaatctcctccccctgatgtttgagccgctcaccggtagtggtgcccggatcataggtttcgatcatcattgccagggtgcggttagggtcaccgttgtggatcagcttcatcgaaactccctggctgccgatttcgatcagatggtcatggtcgatcacgatctgcggctcatgcggctgttccggttcggtaaagaaagccgatagcgacagcccatacactgtcagcagcttttgcagcgtactgatggccgggctgaccttgtcctgttcaatggtgctaatggcactgtgcgtcaagccagacagttcggctacccggcgctgtgatagccctaactgctggcggatctgcgataagcgtttccccggtgccaagctgacgtcgctcataggcgtttttccttttggtagagctggcaggcgttaataaatccctcaaacagcaggcgggacagggcatattcatcgctgttccattcaggatgccactgcacccctaaggcaaagggttgatcgcgaatgctgagggcttccaccaggccgtcggcggcataggcttcaacacgcacgcttgggccaagggttttggctccttggccgtgcagggagttcacccagaatcggtggcaatccggcagcagctgcgccagcaatcctccgtcttgcacggtaacttcatgagcaggggcatattgctgttccagcggcagatcgtgatcttcacggtgctcgagcagctcgggttgttcatataaacgacggtgtagcgtgccttgagtcgcgaccaccagctcttgcataccgcggcaaatggcgaaaaggggaatgcgcctgctcagtgccaagccgatcagcgccaggctcaattcatcgcgcccaggatcggcgtcaggctcatcgccgttttcaccataaaggtgcggctgcacattactggggctacccggcagcaggatgccgtcgaggtggggtagcaactctgccagcatttccggctctgccagcgcgtgcggcagggcgatcggtaatcctccagcagctaacaccgcatttaggtacttttcttgcaaggtctgggtgaggtgctggtttaacctatacctgcacatcacgacgccgacgattggtctgttaaatatattgcccatgctatcccctacaggttgttcgaaattatgaccgataagccgtttaatcgccttttttgttcaatattcactaaatctagcagtcgaatggccaatattcaaaccaaaattaacacttgcaaaacatttttgttgcatctatgtttcattggtggacattatattgagcaagatggtcaaaacatcgaagccagtaagtgtgagaaccacagaccaaacacaacggcgggtgaaacatgcaaaccaacatcgtagaagtcgaaaactttgtgcaacacaatgaagaaaggcgaagtagcacgttccagcgcgaagtgaagaagtatctggaacgttatccgttaacccagcatatcgacgtattgctgaccgatctcaacggcagcttccgcggcaagcgcatcccggtaagcgggctgggtaaactggagaagggctgttacttcccggcctcggtgttcgcgatggatattcttggcaacgtggtggaagaagcggggttggggcaggaattgggtgagccggaccatatttgtgtaccggtagccggaaccctgacgccatcggcggccgatccgcaatatctgggccaggtactgctcaccatgctggatgaagatggtactccctttgacgttgaaccgcgcaatgtgctgaaccgagtgtggcagcgtttgcgtcagcgcgggttattccccgtagtagcggtagagttggagttctatctcatcgatcgccagcgcgatccggaaggttatttgcaacccccttgcgccccaggcacccaggagcgtaacacccagagccaggtttattcggtggacaacctcaaccactttgccgacgtgctgagcgagatcgacgaacttgcccgcctgcaagggctcccggccgacggcgcggtagcggaagcgtcaccgggccagtttgaggttaacctgcatcacaccaatgatgtgttacaggcctgtgaccatgccctggcgttaaagcggctgatacgcatggtggcagagaagcaccatatgcatgcaacctttatggccaagccttacgaggaacatgcgggcagcggtatgcatgtgcatatcagcatgctggacaagcaaggtaacaacgtctttgccgatgcggatggtgaagactccacgctgttgaagcaggcgctggctggcatgatcgccttgatgcctgcctctatggcgctgctggcacccaacgtcaacgcttaccgccgcttccaggcggggatgtatgttcccacccaggcatcctggggccataacaaccgcaccgtagcgctacgtattccctgtggcgatcgcgacaaccaccgcgtggagtatcgcgtggcgggggccgatgccaacccatatctggtgatggcaaccattctggccgggattgtctacggcctcgacactcagttaccgctgcttgagccagtcaccggcaacgggctggagcaagaggggttaccgttcccgatccgccagagtgatgcgctgtatgagttcgaacaccagccggtgctcaatgcgctgctgggcgaacgtttcagccacgtctatctggcctgtaagaccgatgagctggagcagtttgagcggctgatcaccgaaaccgaaatcgagtggatgctgaaaaacgcctgacgtcctcagcccgatcctaccgcgcgccggcgcattcccgcgggctacctgtggcctggcgaagccgtgcgcgacggtgatgacttcttccaacttggcgtacaggacgccggtgaggaataacccaatgacgataagtgccatcgacgataatggcgcgggcaaaccgcaactgcgcaagacattgaaactgtggcaagtggtgatgatgggcctggcctatctgacgccaatgacggtgtttgacaccttcggtatcgtttctggagtgacggacgggcacgttccggcgtcctatctgttggcattggccggggtgctgtttaccgccatcagctatggcaagctggtgcgccagttcccgacctcgggctcggcttatacctacgcgcaaaaggctatcaacccgcacgtgggtttcctcgttggttggtcatcgctgctggattacctgtttttgccgatgatcaatacgctattggccaaaatctatcttacggccttgttcccagaggtcccaccgtggatctgggtggtcgggtttgtgatcctgatcaccgccatcaacctgaaaagcgtcagcctggtggcaaacttcaacaccctgttcgtggtggcgcaggtggcgattatcgtggtgtttatcttcctggtggtacgagggttgcacaatggcgaaggggttggccaggtgtggagtctgcaaccctttatcagtgaaaacgcccatttattgccgatcattaccggcgccaccatcctgtgcttttcgtttctgggttttgatgccgttaccacgctgtgtgaagaaacgcctgatgcggcccgtgtgatcccgcgcgctatcttccttaccgcactctatggtggggtaatcttcatcaccgtatcgttctttattcagctgttcttcccgacgctggagcgtttcaaacagcctgatgcagcactgccggaaattgcgctgtatgtgggcggcaagctgttccagtccatcttcttgtgcatcacctttatcaacaccctggcttctggcctggcttcccatgccagcgtgtccaggctgctgtatgtgatggggcgcgacaatgtgttcccggaaaaattctttggttacgtgcatcctaaatggcgcaccccagcgcttaacgttctgctggttggcttggtggcattatcggcactctccttcgatttagtgacggcgactgccctgatcaacttcggtgctttggtggcctttaccttcgtcaacctctcggtgatcagtcacttctatattcggcaagggcgcaacaagagctggaaagaccgcttccatttcctgatcctgccgctggtgggcgcgctgacggttgggatcttgtggctgaacctggaaaaaagctccctgaccttggggctgctgtgggcggcgctggggtttggctatctggcctatctcacccgtcgtttccgccagccgccgccgcagttggagcgacaacctcagcagtaaaggtatgggcgcagcgcagcgccctttctttttccccggtagggcagtagagtaaaaaaaccgtataaaaataactaattggatcctacgctaatgcctccgttgtccgcttcccataaagctaccttgctcggcctgctggccattgtgttatggagcagcgtggttggtctgatccgcagcgtcagtgaagggctggggccggtaggcggggcggcgatgatctatagcgtgggcacgctgtttctgctggtggtgatgggcattcccaagctgcgcgagttccgccgttcctatctgatcctcggcagcctgctgtttgtgctgtatgagatttgcctttcgctgtcgctgggctatgccagcaaccgtacgcaagccatcgaacttgggatgatcaactatctttggccctgttttaccgtgttgatggccatcctgttcaatgggcaaaaggccaaatggtgggtagtgcctggtttgttactctctctgttcgggattggctggatcatgagcggcagcggcggttggtcaccagcgcaaatgctggccaacgtgcgcagcaatccgttgagttacgggctggcattcagcggtgcggtgatttgggccatctattgcaacgtgaccaagaggatcgcccaaggcaaaaacgcggtggtgctgtttatctccctgaccgcgctggcgctgtggctgatttatcctttcagtaatgaaagcggcatgaactttagcctgccggttgtggtggcgttgctgtgcgtggggacggcgatgggggctggctatgcagcttggaacgtcgggatcctgcatggcaatatgacgctgctggcgaccgtatcttactttaccccggtgttgtcatcggtatttgccgccgtggtactcagcaccgcgctgaccctcaacttctggcaaggggtgatgatggtaacgctaggatcgctgatttgctggtgggcgactcgcggcaactgaggcctgttttttacctgcgcaggcggcagaataatgaatttcgagctaatctcaaggtaagtgttctgccagaaggaacggggaaatgagaaaagatattcaatttattcagcaaccagcgcttaatggccacagtttcagcaccggcgatatcgtccgactgaccaccgctaacctgccgcatgaataccagttggatgtgatgatcctgcgccgtgacgacaagctgatccatggctcggtagtcgtggcctcgccgaaaatcgatatcccggtcagccaatgggaaattgccacgggtgatgaggtggtgttccggcaagagaacattgccaaagctgtgcccggagctcgctgaaaaaaccaactggttagccatataagggggcgtatgctgcccctgcctgccactaagccgacataagcgtcggcttttttacgcgatttttaacccctggttaaaagttggtgttgaacacaaagacaccaaaaatcgtcgtttgaaatttatcgatatgatgaaaatcacatcaaaaatgttttgcactgcaatttattttataaaatgagaacgcaatcgattacgcgatggtaaaatgcctaactggatcacagattattacagcgagagctttctataatgcgcacggcaaccggcaataggtaaccgtttgtttacagcaggcgtcgccagactcatatcattctaacgggcagggaattggcccactcagcatgtggtaataaaatgaagaaaatagctctcgcagcaggtgtgcttctctccgcgtctttcagccccgcttctatggctgcagaaagcaaagacagccagtatctttcagactggtggcatcagagtgtcaacgtagtaggcagctaccatacccgcttcgggccgcagctgaacaatgacgtgtatctggagtatgaagcctttgccaagaaagactggctggatttctatggctacgtggacgtgccaaagttcttcggcaccggtaacacgccaaaccgtggtatctgggataaaggctcaccgctgtttatggagatcgagccacgcttctccatcgacaaactgaccggcaccaacctgggctttgggccgttcaaagagtggtattttgccaacaactacatttacgacatggggcgtaacaacgcctcccgtcaaagcacctggtatatggggctaggcaccgatatcgataccggtctgccgatgagcctgtcgatgaacatttatgccaaataccaatggcagaactatggtgcatccaacgagaacagctgggacggctatcgcttcaaggtgaaatactttgtgccgttgaccgaaatgtggggtggcaacctgagctatatcggtttcaccaactttgactttgactccgatctgggcagcgacaacttcgtagtggatggccgccaggcgcgtaccagcaactctatcgcctccagccacattttagcgctgaactacgatcactggcattactccttcgtggcacgttacttccataacggtggtcaatggaatgatggggtggatatcggtacgccgcaggggccaatcaagtccaccggctggggttactacctggttgccggttataacttctgattttccgtggtatcagaaacaggaaaccccgcactggcggggtttttttatcattatttcaggtaattttctgcgggtaaatgtttaaccggcataaccaatttgcccttgataacgtagcactcattatcgatccacttgaggatttgctcacggctgacaccttcaaattgtgcatagcgataaatatcaccattgaagtgcagctggatgtactccatcagcgtcatgtgcatggatataactcctaaacgcccagaaatagcggttttgccaagctgagtggttgaggttttcaaggcctaaaggtaaattatttgcaacaaaacagcaacaaaaaacgctaaaaagcggcgttactatagtaaaaagtagtaaaagaattcccgcacgggacggcgggaaattgagtactatcatttatcgatgacataagatgggttttgaggtgcaacgaaaaagagctggtttactcatttttgtggcccactaaaattactggatggcttatttcgtcgcaagaaaaatttacggcatttactcggttatcatgagtagttttgcgcgtaaacaattttttgtctgatgaccacgatccatttttttaatagctggcgtgaatgatatgtcgggcagtgacctgctgatgaggcaaaggggggctaggcgggctcagcatgcggcgcccctctatagcacggtgaacctttacgcgtgggcgctgatgctctttttgaaagtaagtacccggctacggctggcgatcagatcgacctggtaaccgcggaaatacagacaaaaccgattcaggctgggcccatcgttgctttcaaccaatatccgcccatcccccagcgaactcagggtgccggtttgcgctgcggggccgaccccgatgtggatctggttgccgcaaatttcgaacgcggtgcggtattgtggatgataccagtgcccttgaacctgttttaggcaagccgtttcactagccaccggcagaaagcggcgtgcaacgtggccaacttcaccttctacggcgtcacccgtccacttaaggcgcattggctgatgggccgagagcgataccgcataaccatctccacttcgatacagcggttcgttggtgcccagataagccacgttgccccctttaacctccaaccagtatggttccgcctgggtggcgtagatgccatctgggatcgccgtgctgcgttggggcagcggttcattcagcagcgccgccatcacctgtaaaataatggcaaagctgtcacaatcttcacggttggcgaccagcagggcaccggcttgccggtccggcgccagcagaaaataggtcttgtagcctgcatgagaaccgccatggcccagcaaagtctggctgccaagcggcgtttgtgccagccctagtccgtaatggctgatttggccctggctgagcttacgtggggcacttagctgcgtcagaacccctttgccagggccgctattggccagcaggcattgcaaccagcgggtgagggcgttggcgctccccgtcaggctgccagaggcggagagatgcaaaccagcactggtttgctgccaacctttggccgagtgccaatagcccggagccagcccaggcaccacatcaaaccagccttcgggagcttgtagctgcacgtccagagggcgggccagatgctgctgaaccagagcatcaaaagcgtagcctttcgtcttcaatgccgcctctaccagacggtaaccggtattggtgtaggtgatctcactgcctgcggggtagttgagccgggttaaaccatggataaactccattaccggttgggcttcactgacggtgttgctcgagacgccaagcagccccagcgtttgccgaatatcgggtagcccgctggtcatgtccaaagcctgtcctaccgtcacctccgccagttgtccctgcaattctggcagtagactgccaaggcgatcgtcaagccgcagggcgttgtcggtggcattgagcgccagcgcggcaaaaatatgtttggtgatcgaggcatagcgcaccacggtatcggtagtgaaaggatcgcggcgtgccagatcggccagccctgcacataccaccgcctgggtcctatcagtatcaaacagggtgatagccccaccgggttggcctgcggtttgccagcctgccaacagttgagcggcggctgcctgtgcggcgcgccagtttagcggggtgtcagacatagtttcctcctgagataacgaacgccacacatcaccgtggccgactacacacgagtgtctaccgcagccaggataaagaagtggatggcgggtatggcaagggtggtctttcaatccctgatctctggcttgcaacgggttggcatgggatgaaagaggcccaattgtggcgcaaggaaaaagtcacgggccgctgttttgtgcgctgttcagaccagtgggcaacctttccatcaaaattgggatgcagtgctcaaatcatcatggaagggcgtgaaagacaggaggggataatggtgagggcaaggtcaactccggcgcaatagcggcaccggagttgtggcggattagcgttgttgttcgccccaggccagcatgctttctatcatctgctgcaacaggcgttgtaaaggtgcagcacggacggcatcaaattcgaatgtctgctcggacatatagttcacttgcgctaactccaactgcaccgcgtgctgatgttcctgcggttgaccataggcacgggtaatataaccccctttaaagcgcccgttcagcacgtggctgaactgttgttgttgctgacaacaggtgaccagcctgtcactcagtgaagcagggcagctttcaccaccgttagtgcccaggttgagatcgggtagcttaccgtcgaacaggcgcggtatcacagaggcgatcgagtgggcgtcaaacagtaaagcgtaaccgtgttgggcttttagccgtgtcagctcattctgtagttgctgatggtagggctgccagatgttttgcagatatccggcccgttcttggtcagaaggggcggcgtccggtagaaaactggggcggccatcgaacaacacatcaggaaacagaccggtggtggcagtggtatagagcggtttgtcatctgctgggcggttgaggtcaatcaccaggcgcgaatagttacccaccaggatgctggtacccatggcacgggcaaaatcgtacagccgtgggatatgccagtcggtgtcttgcagggggcgggcctcatcggtcagccctttctcaaccgctggcgtcaagcgggtaccagcatggggaatactgatcaacagcggcagttggccgctctggaactcgaaaggatcgcaaatcattaacggacttctcctcggaaaatcaccgtgcagggcagttgaccgcccaaccagtaagccagctctgccgggcgtgccagcggccagtgaacaaaatcggccactttgcccacttccagcgagccgtgggtttcctgcaggcccaaagccttggcggcatgcagcgttacgcctgccagcgcttcttccggcgtaagacggaacagggtgcaagccatattaatcatcagacgtagcgatagcgcgggtgaggtgccagggttggcatcgctggcaatagccatcactacgccgtgcttgcggaacagctcaaccggtgggcactgcgtttcacgtaacaggtagtaggcacctggcaacagcaccgccacggttccggctgccgccatcgctatggcatcttgttcggtggcatattccaggtgatcggcggaaagggcatgatgccgtgccgccaatgcgctaccgccgagcgctgaaagctgctccgcgtgcagttttatcggcaggccagcaagctcagcggccgcgaaaactctctcaacctgctcaggggaaaaggccaggtgttcgcaaaacgcatccactgcatctgccaggccagctgctgcggcttcagggatgatggtattgcacaccaggtcaatatagtcgtcgctgcgtccggcatattccggtggcagggcatgagcggccaggcaggtagttttcacttcgactggcaatttttctgccagacgacgcgcgacacgtagcattttcaactcgcttgctagcgttaagccatagccggatttgatttctacgcaggtgacaccctcagccagcaatggctgcaggcggaacagtgcttgttccagcaacaactcttcttgtgcatcgcgcgtggccttgaccgtggagataatgcccccgccctgagcagcaatttctgcgtagcttaccccgttcaaacgttgttcaaactcaccactgcggttgccgccaaacaccaggtgcgtgtggcaatccaccaggccgggggtgatgatgccaccgtcaagcttcaccgttttggtcgcggccaaggcaggcatggcggcctgttcacccatccagacaatcttgcctgcgcgtacggcgatcgcgccgttgctgatgatgtgatacttgccgtcacgcatggtgacgatatcggccccgtgccacaggctgtcgcagtggatctcagacgtcatggtgttcccgctcccacatggttgtatatacaattaaaaacaacctagcgcattcgccggtctgcgacaagagaggggataaaaatttgttaccaagatgtgatgaaacgcgaaaaaggcagggattagcgtcactggacccaaccaatggggcgcatgctgcgccccattggtaacacgtttggtctaactcaaacctgattggtaaaacggccaaacagttgatagcggctgcctggatagagcaggcgggcggaggttaccaccattttgccagaccaggtgcgccgatggatcagcaggcccggttcgtggtcttccaattgcagcagttcgcgctcttgcttggttggcacaacggcttcgacaatatgttcacctgcggtcaacggggcggattgggtcaggtaaatatagggcgtgacccgatcgaaatcctgcttcatataatccggggccgccagcgggttgacgcagcgatcttccacctgcaccggcacgtcattttcataatgcacaatctgcgagtagaacaactgctgacccggcaggatccccaatgccgtcgcttcctctgcgctggccgggcgggcggtcaactgcaaaattttactgctgtggaggtgcccacgggcggcgatctcgtcggcgatattatgcacttccagcaacgcggtgtgtgccttggcctcggccacgaaggtgcctacaccctgcatgcggatcaaaaagccctcgctggtcaattcacgcaaggcccggttgatggtcatgcggctgacgcccagctcgctgaccagttcactttccgaggggacgcgttggtgcggctgccagtggcccgcacggatttggcttacgatggcctgtttgacccgttgatagatcggggcgggggtctcgctcattgctgcagccaactgcaacacggtctgttgatctaccacgacgttaacctcgtcaaataaaaaaataataacaccagtttactgttgatgttgaagatatgtatatgtatatacaagtaagcgtccgttcaccagatgaatgaaactggtttacaaattttttacctgcgcggcgtgacagtcgtgcgttcttagccgttacacctactttggaatactgctatgcctgcttattttgcctctcgcgcactgcttccgaccggttgggcccataacgtacggctcgaagttgatgctcacggtcaattggtccaagtgacccccaatgccgaccctgacggttgtctgcggctgcacggtgacgtggtgccgggcatgccgaacctgcactctcatgccttccagcgcgcgatggccgggctggcagaggtagcgggcaacccacaagatagcttctggacctggcgcgatctgatgtatcgcctggttcagcgcttaaccccggagcaggttggtgttatcgcccgtcaactgtatatcgaaatgctcaagggcggctacacccaggttgccgagttccattatctgcatcacacaccggaaggaaaagcctatgccgaccggggcgagatgaccgggcgcctcagcgaggccgcgcttcaggctggcattggcatgaccctattgccggtgctctacagttacgccgggtttggtgcccagcctgcgcaagcggggcaacggcgcttcattcagagtgcagagagctacctcgaacagcaacaggtgatagctcgccaactggcaggtcagccattgcagaatcagggattatgtttccattcgctgcgggcggttgaactggggcagatgcagcagatcctggcggcatctgaccaggcgttgccggtacatattcatatcgccgagcagcaaaaagaggttaacgactgcctggcctggagcggtcaacgcccggtggcctggctgtatgaacatttgccggtggatagccgctggtgtctggtgcatgccactcatctggatcgtgaagagcttgagcaactggctcgcagcaaagcggtagccggattatgcccgaccaccgaggccaatctcggtgacggcattttcccaggcgacagttacctgcatcaccaggggcgctgggggatcggttcggacagccacgtttccctaaacgtggtggaagagttacgttggtttgagtatgggcagcggctgcgcgatcaacgccgtaaccgcctgaccacgccggagcaacccgccgtggccgacgtgctttatcaacaggcattacagggcggtgctcaggcctgtggtacggcaattggcaagctggcggtaggctatcgtgcggactggctggtgttggatggtgacgacccgtatctggcatctgcgcctgatgcatctatcctcaaccgctggttgtttgccgggggcaaagagcaaatccgcgacgtatttgttgctggtcggcaggtgattgagcaggggcgtcacgcgttacaacagcaaagcagcgcggagttcctacaggtactgaaaacgttccaacaggaggcatgatgaaactgaaccgtttcgattttgccgaactgccggtcagcccatggcgtaatggcggcggagaaacccgtgaaattacctgccaaccgccgggtaacgccgaattaggctggcgcgccagcattgctaccatcgcgcaggacgggcctttctcggcctttaacggtattgaccgttccatcactttgctagaaggcgatggcgtacatttgtacagcgaaggattgatcgatcaccagctgcagcgcatcggtgagccgtttgccttctctggggatgtggcgctagaggccagattattaggcggcagcagccaggatttcaacatcatgacgcggcgtggccactaccaggcgcaggtgcaacgcattgctgagaccatcgggctgtcgttacaacatgccggagtgttgtatgtgttgcgaggggaatggcagttgccggatggaagcttgctgggcgcacgccagggatgctggtggctaccaggggatggtccgctgcggctggttgctcagggcaatgatgctcaggtcttatgggcagatatcgtgcctgccacgctgttgtaggggcgctgtaggccgcgtccgcgtattctttgtcaccaatctggactattccgattactcagccaaggctgacgtgagaagatagcatctagagaggccgggcttgcataccttgggctcttacaggatcgccaaccacttcggttggcgattcactttccctctttcagcatgttgatcgccgcagcgatcaggatgcgctgctcgatatcgtgactttccgccagatgctgcgccaactgcctggacaggctccccaccgacaattcctcgccgcgatgacgtaactgcatcacgctgtcgccaatcaatcgggcaacctcatcccatactggtttgatctcctgttccgagaacttcatcgctaacctcggctgggtgatttttgctcaatgtagcagttgccaaccggtagcgctacccgtcaggccacagagaaaataaaaccggaagtataaaaattatcccatcagtgtttcttctggtttttatattcaatactggattggtcaattcaacgagaggggcgcaaccatgaaactggtcgaacaattagcggcttattatcaacttagccgacatgccgaagtgaacaatcgctggtgccgttggtggctaccgcagggggaagcccggatggcctatttgcgagagctgtttgagccagtggccaaagcgcctcctacccgagcgggagaggcggctaacaaaatgcaggattaaccgaagacgatagccgcccagcgcaataacagcagggccagacagatcagcaccaggatcacaaacattttccagtgtttggtacgcatacgcttggttggcaattcggggttccttattttcctttagacgcagagataccaactacccagagcgataagggtgatggctataaaggtgatgattttcagtaaatcactgaaggtgtcatcgggatcttgctctgcctggttcattttactgccctggcaggttggctgccattgaggacgtcttgatccacagtatgaatgctgcactgcgatacgcacagaactttaccgtaaagtcaggtaaaaagcaggggctgcgagcctgcgcgacaacgtgatggatgcagacgtgagggaatacggtgtaatattgcctgagcacctgtgacttaatcaataaaggtaaagcaatggccattcctgaaaagtatgaaaatgtagaacgttgggcgtttggtgataccgaacagcaggcggatgagttggtgaagctggtgctggatggggtcaagaccgccacctgctccaatctggatggcgaagggatcccacagcctggtgatgtctttgtggtggtggacggcaagaacgagccagtgtgcgccattgagctgacgaaagtggatatgagcacctatgaacaggtggatgcggctcatgccttggcggaaggtgaaggcgatcgctcgctggattactggcgcaaagagcacaaacgcttctttgaagagtatgaactgttctcaccggatatgacgttggtgttgatgcatttcaaggttatcgaaaagttctgagtgatgtcactgcctgaagtgccctacgtgtgtcaatgggcgacgccagagctggctgccaatctgattgccgggcgtgctacgttggcggatgatgccaactgggtgcagagcggggcggctagtccggcggaatatgtcgagtgggccaaccacgtgtgcggtatggcctgtctgaaaatggtgctgacgcaccgggacggtactgcaccgccattgctggagctggcacgccgcagcttgccttacggggcctatgtgcgtgacggagaacggatcaaggggctgatttatgcgccctttgtgaagtttgtgcgtgaacagtttgcgctaacggcagaggtgcgagtcaatctcgatgaacatcagttgccgccgctattggagcaacaccgctattttatcgcctcggtgcatccgagtatccggcaaccagcgatacagccgccagcgcggggtgggcatctggtgctggtgttcgctgcggatcggcatagtgtcacctttcataatccttccggtgatagcctcgccagccgtcagaaggtgacaatgtcactggcagatttcggccgtttctttgccgggcgcggtatcgccatcgcataaaacaacgtgccgtgcccaatgggaacacggcgcgtcctttctcctgaatctctctactccagccgcatcacccaggcatccgcatgtcgatcgtaatgctgtttgtacagcagcgactgctggccatccagcatggccggaatactggtgtgctcgtcccaaccgtccagttgcatgcacaggtcggggtctgatttgcaggggatcgccagggtgcttttcccttcggcgtgttcagatgctggcgttaaatgcgcgtcatcaacctcgaagctgcctattttcacgacggttttgcccattggaactccttgctgaggctagtggtatgaggtgtgaccagttgcggccacccactaagcatagacaaacaggcgaaaaagtcacaaaaaaagtagttatcggcccgccggacactgctcgtaacactagacccagccgttaatactgacttaattgccacgataaatattaacgtttctcactatcgcactacttaacaattttaaagtcgaggtatggcgagtttttctggagtaaaatttgttaataatatgaaaaatggttttttatccttattttattaaaggcagataaattccgcttaagctaaatttattaatctatatttaaccacgaaagcctgtgtcatcaggtttttgccgccagggttcgctagcaaaaaaacagaacccggtttgagcgtcgtcctttggcagtttttggcagtatgtgagtccaccagagaatttccatacgcaacctggttgcatgaatacacatcggtgtaagttgttattgggagttatcatgggcgaaaaaaagagtttattactggccttgctggctgctgcgaccttgtcattggcttcaggtgtgcaggctgcggggactttgacagggcaagttggcattcagttgacgatcggtagcggatgtaccgtgggtaacggcggtgcaaccggcggtgccaaccaatgggggaccttgaactttggcagttactccgatctgaccagcgtgatcaacggtacggtatttggtgccaatggttccagcgcggtcaccatcacctgcagcactggcctgagcccaacgctgtcgctcaatggcgggctggcggcaacgggcgcgctgcgtgccatgagttccggcggcgacaccattccttatcgcctctattctgatagtgcgcgtaccacggaaatcgccattaatacgccgattgccttgacgacgggcacgaccgcacaaaacatcccgatttatggccgcgtattacctggcgaccagctcagtaccacaccaaccgcagggacttacaacgataccgtagttgccacgctttcctggtaaggctgttattccgtcgggggcgaatcagcccctggctggttttctctacgggaaggaacgagcatggggatcaaggtattgctgctgttgccagcgatcttgtcgcagtctttactgctcaacattcccttaggtcaggcggcgacgatcggcattgcagccacgttgctgcccgcctgtgaagcgggaacgacaacgtcgggcaataccagctttggcacgatgaatttcggcacttttgccgctgtgaacactgtgatcaacgcgaccagcgcccagttggcgggctcaatccgtgtcaaatgcgtcagtggtctgagttataaaatcttgctggatgggggcagcagtggcgtggtcacgaatcgcaaaatggtgaataccaacaatagctcgattagcgtgcagtacaacctttataccaaccaacccggagggacgatttgggataacaccaccgggctgagtgacaccggcaacggagcagatcaatggcacaccgtctatggccgtgttccggcgcaaaccacaccggctgccggtgtttatctggatacggtgaatgtcaccgtgtcctggtagcggggggcattgatgcgccatgtctccttgatcctgctaccgttgatgatgtgcggtgcgctacgtgctgccacgccaaccaccacgacctttaccgtgacggcaaccctgaccaacggctgtgcttttggcagctcattttccagccctacctccaaccttggcaccatcaatttcggatccatgacgaccattaccagtaatgtcgataccgtgagtaccgccggtgccggttcggtggtggtgacctgtacgccgggaacgacggtcgccattgctatggattacgggactcacggtggcagcgccacccggcgtttcatgcaaaacaccgccaatagcgacactctgggttatcagctgtttcgcgatgccaaccgtagtcaggtctggggcaatggcgcattggtgatgtctatccccagttttcccagtaccacacaaacttacccggtttatgcccggttatacgccgtgaccacactgccttcggcaggaacttataccgatacggtcaccgtaacattaacttattgaatcatcaggatatgagctatgtcgaccttgtttacccgcattatcagcgctgtagtactgagttacaccctgtgtgcttcaatcacggcacaagccgccagctcggtgctggtttggccggtatatcaaatcattgagtccgatcagaacggctctgcattatggctgggaaaacgcggggcagagcccgtttctctnaaaatcgcggggcagagcccgtttctctccaggtgcgggtgctggcatggaaacaggaaaattttaatgagcgctatgccgatcagaataatgtggtcgccagtccaccttttgctaccgtaccgccggggcaacgccaactgatcaggttgatccgcaatacgccggtaccggccaataccgagcaggcgtaccgcatcatcgttgatgaaatcccgtcgccgatcagtggcgctgccggggggcaaagtaaagcggtggtcgggctgcagttacagatgcgctatctgctgccgctgtttatggatggtgctggcttgtggaccaacgaacgtagcgatatcaaacgcgatgctgccacagcgacgcgtccagtgctgcaatggcgcacggtcaatgacggcgggaaaacctatttgcaggttcgtaatagcggcattgtgcatgcgcggctgagtaatgtgttctggtcagagaaaggcaaccaacagcagggcgtgaaaaccatgatcgcgggctttatgggctacgtcttgccagggcagtcaatgcgctggccggttcctgccggggttagtcctggtgtgcaactcaatgcgcaaattgccgataacaccaaacccatcgtcattccgcgcggcgaatagcggcaggaagcgcgacgaatgccgatccgagccattattcgccccggtcatcagtatccgctgtattgccggggcggtctgtgcctgctatgcctgagtaccttctgcgttcaggcgcaggagtactcatcattgcccgatgccccgcgtgcggcaccggtgatcaccaatgcaatgttctacctgaccctggtcgtcaatggccagagcgacggccaggtggtacctgtgacctatcgggaaaatgcgtattacgtggaggccggcgtgctggcaaagaaccacgtacggaccaatggccagcaagggttgattaaggtcgaggagttgccaggggtgaaggtgaaatatgattctgccgcccagcagctgatttttcaggtaccggatacctggctgccaaaacaggacgtcggcggcggcgagctgatgaattacaccgtggcgcaaagtagcaccggtctgctgctaaactacgattcctattataccgatccccacgaaggttccagttcggttgccacctggatggagcaacgcttgttcagcaatgcggggattatcagtaataccgggacctatcgctacaatatcgacaccgtatcgggcgacggcggcagtgccgttcaagaccgctatttgcgctacgatacgttctggcgttatagcgatgaacaagatctgatcagctatcagcttggggattttgtcagtaactcgctaacctggagtaattcggcccgcatggggggattacgcatcagccgcaattttgccctgcgcccggatctggtgacctatccgctgttgcaatatagcggtaccgcagcggtccccagcactgtagatttatttctcaacggctttaaggccagcagcaataacctgaactccgggccgtttaccctcaccaatgtgccttacatcaacggggccggtgaagcgacgatcgttaccaccgatgcggtcgggcgccaggtatcaaccacggtgccgttttatgtatccaacaccctgctgcgtaaaaacctgagcgactttgatgtgtcactcggcgcggtgcgccagaattatggcatctctaatggcgattattcagacgcagccttcagcggaatttaccgctacgggctgagtaactatttgacgctttctgggcacagcgaggctacgcaagggctggcgctcggcgggttaggggccgatattgcggtgggaacctgggggacgctaagcctgtctggtagccagagcaaagccaaccatccgccagtagcgaccagcgatgtggtgaatgatcagattgtcctgccaaatacaccaggtatgtctggcaccaatcagggtattgataatccgctgggaactaacgtgacggacaaaaaagacggtagtcagtacacgttgggctactcctataattcgacgttattcagcttttcggcacagcgggcctcgcgcaccgtgggctatcaggatctcacatcttacaccagcaatacccgcctgagccgtcaatccgatcaggccaccttcagtgcttcgccgttcggctcaagcaatggcaccctgggcttgggctattacgacgtccaggcctatgacaactctcatacccgcctggtgaacttctcttacagccgtgccctgtgggggcagagcagcatgtttgtctcactcaacaaaacgttgggggataacggctacagtgcgcagctgcaattcattattccactgggcagtgatgtcagcctcaatgcggggttggcacgtaacaataatgggcattatcagcagcaggtgggggccagcaaggcggctcccacggatggcggcatgggctggaacctggcttacagcggcggtggtgatggctatcaacaggccgatgccacctggaaaacccgctatgctacgctgcaaggcggcatcttcggcccacaaggggaatacaccaattgggcagacctgagcggctcagtggtgttcatggccaactcctggttcctgtcggacaagatcaacgacgcgtttatcgtggtggataccgacaattacgccggggtttcggtactgtacgagaatcagaagatgggcaccaccgacagcaacgggcatctgctgatcccgtcgatcagctcgtactatccggccaaggtcgagatcgacacgctgccgttaccggcggacgtggtggccaaccaggtcaacaatcgcattgccgttaagcaaggtagcgggatggtggtgaaattcccggtacaaaaagtcctttcggccaatatcacgctacatgacaccgccgggcaaccgctgaagctgggcaccttggtcacggaacaaaccacgcaacaaaccaccgttgtcggttatgacgggctggtgtacttctcgcatttacaaccccatggccagttaagtatccagcgggaggatcgctcggtatgccgtgtgggcttcgacctgaaccctaattatcacagcattgaacaggtcgggccgctggtctgccaaggcagtgctgaagagaagaaatcatgattatgctattacgatggatgcgagcaggattggcattgatgctgttggcgggttttattccatcaggaagggcgggctgcacggctactcctaccaacggttcgctgggcacgcaaaactcctttgcggtcagcagcgccccattggtcacctccgtaagtagcgggctgacctgtactggcgggttgctcaatattggcggcaccaataccattaccgccaccatcggcacgacgttgcaccctgtcagcacccagccacgtttattcagcgcggctaccggccagtatttgccttatagcctgtgccaggatggtggctgcagtacgctttataatcagggcagcgtgattacctggagcaataccaccgcgttgggtttactcggtttgttcaccgggccaaacagtacgctgccgatttttattcgaccgcaaatgaactctaatctggctgccggcacttataccgacaccatcccgattacctggtcctggagcatctgctcaattgcggtaggcaatctgctttgtctccctgataccggtagtataacgagcggttccaatattaatctgtcgctcgtcatcaccaactactgctatatcgacagcgcgccgaacgtcggttttgggactgcggccttgccgtctggcctcaccgcggttgttgccaataccatcagcgtacgttgtaccctaaatgccagctattctgtcaatctgaccagcagcgtcgccagttcggggcaatatcggcaaatggcgtctacggtaaacggcaccaccagctatattcagtatcagctgttcaagggggatagcaccgtttggaccgccgccaccaatagcaacgcgacgggcacgggcacctcgcaatccttcccctatactgcttcggttaatctctcgcaaaataaccagccagcagggagttatagtgacactgtaacggtgaccgtggcctattaaatgttattgatggaaatccaacactccatcacgcaccagttcgcggggcaggctgtttttaatccggctgccgatcagtttggccagccctagcggctgatgctgataagtgacgatacactcattgctttgtgggggttgcgaggggtagagatcgcggccatgaaaccactcctgggccagcgccgcatcaagctcaaacgtctgtgggttgccactggcagccaaggcgatcaccgcctcatgctgccagcggaacccttttgggaagcgttccgccaacttaaggccaatgcgtgaaaaacgcactttgctgactaaaggttccagcgcggcggggaacagccagatttctttatcccgcgcccataatttgctggtgtcatcccaggttaagccagaagctgcggcagcctgtgccaccagtgcggactcctgggccgagagcggggtgaaggggaacttacccagtttatagctcggtttggccagggccggaacgctgtgatttttacgcagccgggcgacaaagaagccttcactgtcataaatctgcgggaatacgtgcaggaagccttctggggtgagggcaagctgtgcctgtgggaacagatcgtccagtggttctacgctgacggcatcgccgtaggtggccaaaagttgatgcaccacttgctgattttcctgagcattcaacgtgcaggtggagtaaaccatcacgccgccgggtgccagggcgtggaaggcgctgtcgatcagttcccactgggtttgcgcgatgctcgctacgctttctggtgaccagttgctcatggcatccggatctttacgcaccacgccctcaccagagcagggcgcatccagcaggatggcgtcaaagctttccggtaaggcggcgccaaacacccggccgtcgaaatgggtcagcgccgtatttttgacgccgcagcggctgatgttggcgtgtaataccttgactcggctggccgaatattcattggcgacaatgccgccctgattgcccatcaacgcggcgatctgggtggttttggaacccggcgcggcggcgacatccagcacccggcgcggggtctcacgcccggcaaacagggcgctcaccggcagcatggagctggcttcctgaatgtagaacaggccgcttagatgctccgccgcgctacccagccgtaatgcttcgtcctcgcgctcgatccaaaagccttcggggcaccaggggatgggttccagccgccagtcgtagtcttttaccagcgccagaaagtcggcaacgctgattttcagcgtgttgacccgcaggctacgccgcaagggttgttggcaaatagcgatgaagtcatccatggataaatggtcaggcatgatggcgcgagtcgcgtcgagaaacgcaggaggcaaaaaagcaggagcaggtttagccacagggagctctcagggcggaaaaaaatcgaaggggctagtttaccataaactgcctgcctgagaataccggcaagttacggtcaatgagatggatgacaaagcagcaatgatagggattattcaggtggcggcagcttcggtacggtgaactcggcagggttcagaacattgaaccctgccgatagctatcagttatccctcgggatggcggtgccccattcgcgccaatctttcggctcttccgcattcagcaggaagtgtttgttcggcgtggctttaggggccaatggaatgcttggtggggtggcaaaggcaataccaccgcgaataaactgctggaaggtaccgctctttatcacaccgcccgtcaggccaaactgcaggttatagccagaggccagccagaagacgctgttgttacgcaccagatgctggtatttcttgctgacgcgcagtgagacgtgaacacgatctgacatcgcccccagatagaaaccggtcacggtacccacctcaatgccacggaacaggatcggcgtgccgatttgcagcgaaccggtttctgcggcgtccaggatcacgctcagcccatccaggtagcgggagtcggtaatgctggcttcctgtagctcaaaagtgcgcattgagccgccgtggccaggttccacgttgatatagggctgcaagagggagtccagattattgacccccgcggcagaaatctccggtgacacgatggcgaaacggctgccgagacgggcaaaggttttcacatactctgggtacaatactgcttttgccagcacctcgttacgctccggtgccagtttcagagattcaagctggccgatatcaatgcccagatagcgtattggcatgccaggggacagtttgctggcatcataggtgcgtagcgtgatctggctacccacggcgcgagcggcagtttcggaggcgtacagcacgcgtttggcccctttatccagcgtaacgccctgcaggttatcaaagctgatggcgcctttcagcgcgcggttgagcggagaagcctgcaccgtgaggccgctgccgttcaattgcaccttggcaccaccttccgcccagaaaatgctttcgctggttaacagcttgcggtattccgggctgatatagacctcaacgtcaaactcgttggctttgggccgtacgttgacaatctcacccacctggaacttgcggtataacaccaccgagccggcttgcacatctggcaggctggcagcggtaagcgtcaaggtcggcagtgggttgttgccgacgatgccctcggcggctttttccgcattgctgtacagcggatactgagcgtccggttcgcctttacctccagggatcaggcgtacgccgccgtccagccactcctgggcgctggcacccaacacctgcacgccgtccagcccgaatttgacatccacacggctgttgaccacgaatttactgtctttatgcagcaaactgcggtgttgaggttcgatcgccgccgtaaaggttacgccgctgtcggtcagggttcgtgtcaggatctggccaatcttgatgccgtgcacgattaacggttgcccgacgtcgatgccgtagctttgcggggcattcaaagtgaccgttaccacgccaggctgttgcagcagcgttttactgctgtccaacacggtaaagtgctgctggggttctccgtcacccggcaccaattccagggtgttgccggtcaacagctggcttagcttggcgtcgttaaggctgatttttgggctgcgcatctcaatgcgcgtgccactacgcatcagatcgaccaccgaaggatcgatggtgagttcgccggttaccttgctatcctgttgcagagccaggcgagtcaaggtgccgacctgcaatccttgatacatcagcggtgtgcgcccctcgctaaggctgttgccgtcgggcaggtccagcgtgatattcaccccgcgttggctgcgggccaggtccggatacagcgtatagttttgatcggctttggcctgcttgccgtcgagcggggaatcaaaggctatcgcaccatttaccagcgctgccaggctttccatctgcacgctggcaccggacaggctgaaatcgcctttaaaacctgaaacgttccagaagcgggtgttatccttcaccagattggcaaagcggcggtcgatcagcacgtcgatgatcacgcccttgttacctggcgaaatagtgtagtcgtaaactttaccaacagggattttgcgataatagaccagcgagccagtgttcagggaaccgaggtcgtctgcttgcaggtggatcatcagctcaccggtgttcagacggtatttcggctgcgtgtccaacgcggtgaagtgggtttgtggctttcccccgccccgcatcatgccgatgtagttaccccctaccagcgcatccaggccggaaaccccggccaatgaggctttaggggttaccagccaaaattgtgtgccttcccgcagtgagtcttccagatcgctcttgatactggcttcaaccacgatactacgcagatccttgctcagcgaaatgctttgcacggtacccacttccacaccctggtaacgtaccggcgtgcggccagcgacaatacctgccgcagactggaagtctatggtgacgctattgccgctctcctggtaattggtatagaccagccacccggcaatcagcagggcgataaacggcagtaaccagaatggcgagatacggcgcttgtttttgacccgcgcctcagtcggcgtattcggcgtttcctgttgcatgtgcatcccaaatcaatcggctgtccagccactgtacggcaaggatagttaaaataaccgcagacccaaagtaaaaagctgctggccccatagtaaaagataacagttggtcgcgattgatcagcgacatcatcaacgagatcacgaacagatcgagcatcgaccagcggccaacccaggtgaccagccggagcagccggatacgggttttgaggctgtgcgacgttttgaaatgaatgctgaacagcagcaccagcaggacgatcaccttggtaaagggcaccaggacactggcgataaatacgatggcggcgatcggaatattacccgaattggccagcgaaacgacgccgctgaaaatggtatcttccatacgcgcgccgttggcgtaaaccaccgaaatcggcagcaggttggcggggatcagcagcacgatggcggcaatcagcgcggcccaggttttttgcaggctgtaaggttggcgatggcacatcggcacatgacagcgggggcagcggccacgctcatcctgaaaaccggtaaaatggcaggccaggcagacgtgtaacgcctctggtttaccctctggctgttcctgcggatagtagcgttcccacatctgctccaggttcatgtggatcagcgtcagcaggctgagcagggtcaatgccagataggcaatcagggcgctgccggggtgaatatctgcatattccttgaccttgatcgccgcgaccaccataccgatcaggtaaatatcgagcatgatccactctttcagacgctccagcatcagcaacacaggccgcaggttcatgccgagcgcatggccaaaccacagatacagcaatgacagtgatagcgtcagcggcgcaccgatggtgcagaaggcgaccatactggcagtaaatggatcaccctggctgctcatttgccagatgccttccaacaggctagcgttaatcttcgtgccgagcaggcgaatgctgatcaacggctcgctaaaggcaaagggcatcagcaacagcatggtgacggctacggcggtcaggcgagtcattgaccagtcgcggccattcaccaccttggcgttgcagcgtgggcagtaggcggcttgattgcgggttaacgacggcaacgtgaacagcaaatcgcattcacaacagcgttggtggcgagccttggagagcgggccggtaatggcgagtatcttcatcatgagtgctgtttggcgacctgaggtctacttagcgtagctggaaaaccaacccgtcaatgccatcaaccggtaaaaagggattggcatcgcaggttacaaatgatttttagacggcaaacataccctgttgtaccgtgttttgtgaagcaacagatgattaaccttgtggctatacgcatttaatgcttattttataggggttaagtctgggctatttgagtatttgaacggttaatcatgactaaagaatcattctacgcggaattaaaacgcgatttgagcgcattgctggatggggaagataattttatcgccgcattgtctaacgccagtgcgctactcaatgagcgtcttgatgacgtaaactgggtcggtttttacctgatggaaggccatcaactggtgctaggcccgttccaaggcaagattgcctgcgtgcggatcccgttgggtaagggcgtgtgcggtacggcagcggcgcagaaccaggtgcagcgcgttggcgatgttcatgcatttcctggacatatcgcctgcgatgcagccagcaacgcggaaattgtgttgccgttagaggtcagtggtcaggtcatcggtgttctggatatcgacagcacagtttatcaacgcttcgatgaacaggacgaaatcggcctgaaagcagtggtggcggggctttgcgcacggctggcacagagcaattttgcgaaatatgtcactgtagcggcaagttgatctacggttaacgtggcatttagcgatggcgtcattataatgacgcctgttcatgcctgcggcttgttggcaacccgttgtaatcaggaaatttcatggaaaatcaacacaagttgaacacagttaaagaagtcattgcttttcttgccgagcgtttcccgctctgctttagcgccgaaggcgaagcacgcccgctgaaaatcggtatttttcaggatctggtagaacgtgtacaaggggaagagaacctcagcaaaactcagctgcgttcagctttgcgcctgtatacctcaagctggcgttacctgtacggtgtcaaagttggcgcccagcgtgtagacctggacggtaacccgtgcggtgagctggaacagcagcatgtcgatcatgctcgtcagcagcttgaagaggccaaagcgcgagttcaggcgcaacgtgccgaacagaatgccaaaaaacgtgaagctgctggtgagtctgccactgccgagcctcgtcgtccgcgtcctgccggcaaaaagccagccgtacgtcgtgaaggcggagccgcagcagagaaccgcaagccgcgcacacaacaagcacgcccacaacaagctcgtgaacctcgtgtagccaaagaggccagccagccgcgtcatgtgccagtcacagacatctcaaaactgcaaattggccaggaaatcaaagtcagagcaggtcagagcgcgatggacgcaaccgtactcgaaatcgctaaagatggcgttcgtgtacagctctcctccggtctggcgatgattgtgcgcgcagaacacttgcagttctgatacggaggccaaccaaggcatgaacaaatttgtcagattaaccgcagttgcggctttgctgtgggccggtgtcagttacggagcggatacagccaacatccgcatcgatcaactgcccaagcttgagcaggaagctgaacatgcaaccgtgagtgagcgcgtaacctcgcgcttcactcgctctcattatcgccagtttgctctggatgcggatttttcaggcaagatcttcgatcgttacctgaatatgctggactacagccacaatgtgctgctggcctccgacgtcgcgcaatttgccgacaaacgcagcacgctgggtgaagagctgaaatccggcaaactggttacgccttatgcgctgttcaatctggcgcaaaaacgccgctttgagcgctatcagtatgcgctgtcactgctcgacaagccgatgaacttcaccggcaatgacaccattgacgtagaccgcagcaaagcgccgtggccgaaagacaaggccgaattggatcgcctgtgggatgccaaggtcaaatacgatcagttgaacctgaagctgaccggcaaaacggataaagagatccgtgacacattgaccaagcgttatcagtttgcgatcaaacgcctgacgcaaagcaacagcgaagacgtgttctcgctgatcatgactgcgtttgcccacgaaatcgatccgcataccaactacctgtcgccacgcaataccgaacagttcaataccgagatgagtctctctctggaagggattggtgccgtgttgcagatggatgatgattacaccgtgatcaactccatggtggcaggcggcccggcagccaagagcaaggcgatcgccgtgggcgatcgtattgtcggcgttggccaggcaggcaaaccgatggtggatgtgatcggctggcgtcttgacgacgtcgtctcgcagatcaaagggccgaagggcagcaaggttcgcctggagatcctgccggcaggtaaaggcaccaaaacccgtattgttacgctgactcgtgagcgtatccgtctagaagatcgcgcagtcaaaatgacgatcaagaccgtcggcaagcagaaggtcgcggtgatggacatccctggcttctacgtcggcctgaccgatgacgtaaaagtccagctgcaaaaaatggccaagcagaatgtcgacagtctgattatcgatctgcgcggcaacggcggcggagcattgaccgaggcggtatcgctttccggtctgtttatcccaagtggcccagttgttcaggtgcgtgataacaacggcaagatccgtgaagatgcggataacgacggcgttgtctactacaaaggcccgctggtggtgctggttgaccgcttcagcgcctccgcttctgagatctttgctgcggcaatgcaagactatggccgtgcgctgatcgtgggcgagcctaccttcggtaaaggcacggtgcagcaataccgttcactgaaccggatttacgatcagatgctgcgccctgaatggcccgcgctgggctctgtccagtacaccatccagaagttctaccgcgttgacggtggcagcacccagcgtaaaggcgtcacaccagatattctgatgccaacggggatcgatccggcagaaaccggcgagagcttcgaagataacgccatgccgtgggatagcatcaatgcagctgcctacaccaaaaccggtgatttgaagccgtttgaaccgcaactgctgaaagaccatgcgcagcgtatcgccaaggatcccgagttccaatacatcgcgcaggatattgcccattacaaggcgttgaaagacaagcgcaacatcgtttctcttaatctggctatccgtgagaaagagaaccatgacgatgatgctacgcgcctgaaccgtattaatgagcgcctggagcgtgagggtaagaaaccgctgaagtccctggaagatctgccaaaggactacaaggagccggatccgtatctggatgaaacggtcaagatcgcgctggatctggccaataacgaaaagcagcagccatcgcaacagacggccgccgccaagtaagttatttgcggatttaacgttatcgagcgcacctacgggtgcgcttttttttcgctatactcgcactaaaatttctgttggggtctccaccctgtgctccgagatcgtttacactttgtaaaacccttgtttcttcgtgactttgtaaagttacgtatttttagtggcttaatggcctgccaatcttgaaattgtgaccaatgcccataagatctgggtatctgaggtcgccttttgttaacaaataacgaggaagtaaacattctatgatgcgtatagctttgttcctgctcaccaacctggcggtgatgttggttttcgggctggtgcttagcctgacagggatccaatccagtagcgttcagggcctgatgatcatggccggtctgttcggttttggcggtgcatttgtttcactgctgatgtccaaatggatggcgctgcgctccgtcggtggggaagtgattgaacagccgcgtaacgaaaccgaacgctggctgttggacacggtgcgtcgccaatcgcagcaggcgggtatcgccatgccgcaggtggctatctaccaagcgcctgacattaacgcctttgcaaccggcgcacgccgcgatgcatcgctagtggcggttagtaccggcttgctgcaaagcatgagccgtgatgaggcggaagcggttatcgcccacgaaatcagccacgttgccaatggcgacatggtgaccatgacgctaatccaaggggtggtgaacaccttcgtgatcttcgtgtctcgcctgattgctcaggtggccgccggtttcctcggtaaccgtgatggggaaggcgaaggtaacggcaacccgatgatttacttcggtgtttcgatggtgttggagctggtatttggtattctggccagtattatcaccatgtggttctcacgtcatcgtgaattccacgccgatgcgggttcagccaaactggttggccgtgagaagatgatcgctgcgctgcagcgcttgaaaaccagctatgaaccgcaggaagcgggcaccctgatggctttctgcatcaacggcaaatccaagtcgttcagcgagctgtttatgtcgcacccgccgttggacaagcgtatnccccccccgccgttggacaagcgtatcgaagcgctgcgttccggccagtatctgaaataaccctgtatcaagcaaaaaccccggctcgccggggtttttgctattcaaacgggcgcagtgctcgataagctatttaccgggttcagcgaggttcgcacggggttgagtgatgcgcaggcagctcaccacggcagcgacgctggcgaaagctcccgccaataccaatgaagcgtgtgtgccgctggtggggaacaggttgaacattaatgccaccagcgccgcgccggaggtttgccccaacaggcgcgcagtaccaagcatgccactggctccgccactgcggtggcgtggagcggcagaaataatggtatggttgttgggcgactggaataacccaaatcccgcaccgcaaagcaccatgcgccagatgatatccagatccgtcgggttatgtggcaacagtgccagcaggaacaaaccgagcgcgaaggtcgccaaaccaatccctcccagtaaccccgcatgaacacgctccaccaggcggcctgcaatcggtgccatcacgataatggccaacggccagggcgttaacagcaaacccgtcgccacctcgtcacggcccagagaggcctgcaggaagaagggcaacgacaccatagccaacatctgggcggcaaaagagcagatcgaggtgcccatcgacagcgcaaaaatagggatgcgcagcagatccaccggcagtaaaggggatgtctgccgcaactgacggcgcacaaagaagtaaccgatcaccagcaatgccgcgatttcagcggcaatcagcagcagactttgcccctgggcaaaaccgctaatggcggtgatcagtagaccaaacgtcagggcattcatcagcgcactggtggggtcaaagcgctgattgctgcttttctggctattagccggcagatatttcattcccagcatcagtgcgacgatgccgatcggcagattgatggcaaacagccactgccaggaggccacggataaaatggcggcggcgaccgtaggcccagcggcggaagagaaggctacgatcagcgagtttattccgatgccacggccaagaaagcgttgcggatagataatgcggatcagtgcggtattgacgctcataatcgccgcggcaccaaacccttgcagcacgcgtgcaatcgtcagtgttaatagcgaatcggacagtgcgcagaataatgaagtaatgctgaataccagcagaccagcctgatagatacggcgatagccaatcagatcgcccaaggacgccagcgatagcaacgagatggtgatcgccaactgataggcattgaccacccagatcgagctggccgggctggcgttgagatcgcgggcgatggtcggcaaggccacgttggcaatagctccgtcaagtactgaaacggtaatgcccagcgcaatggccaggatcgctccgtagcgttgcgggacgggtaagccgtcggaattagcaagcgttgtcatggagatggttactaaacagggggaatattacaatgctaatcataattcctgccgaatgcacccgccgtttctgtgctaaatgtaaaagcagtgggatgtctgccgctaatcccatcaataatggcgaatattgcgcaacttccattgcatggggtgaaatgttccgattatactgaaactcttgttcaaatttcctaaaacaaaaatagttaagttaaggtattaaccatggctaacgcagatctagacaaacaaccggattccgtttcatcagtgctgaaagtgtttggcatcctgcaggcactgggtgatgagcgtgagatcggcattaccgagctttcacagcgggtaatgatgtccaaaagtaccgtttaccgtttcctgcaaaccatgaagtcgctgggttatgtctcacaggaaggggagtcggagaaatattcgctgaccctcaagctgtttgaactgggtgccaaatcgctgcaaaacgtcgatttgatccgcagtgcggacatccagatgcgtgagctgtctaaccagacgcgtgagaccatccacctgggggcgctggatgaagacagcatcgtctatatccacaaaatcgactccatgtataacctgcgtatgtattcacgcatcggtcgccgcaacccgctacacagcaccgcgattggtaaagttctgctagcctggcgcgatcgcggcgaagtggaagaaatcctgtcccacgtcgagtttacccgcagcactccgcacaccatcgccagcgccgctgaattactgccgctgttggataaggtccgtgagcaggggtttggcgaagatatcgaagaacaggaagaaggcttgcgctgcatcgcggtgccagtatttgaccgttttggcgtggtgatcgcgggcttgagcatctccttcccgaccatccgcttctctgaagaaggcaaagagggctacgtggcgcagttgcacaccgccgctcgtctgatttcagcgcaaatgggttatcacgactacccgttttaagcttgccgcagttgtagggggccgaatatagcttcgcccctacgctttccctcccagcctttgttatctctctcggtttataaaatcccactgttctgctatcggcccatcttgcactctttgaacaagtgacgtggaacaccggcaatggctgggcgaatagcaaagaggtcgccagaatcagggtattcagccagttcagagggcgtcatggcaaaccgcgccgtagtgatgaataaggtttccagaccttcctcgccaaagcagcaactggtggggcgcggcacgggcatggcgacgcactcgcccaggctgccgttacggtcgtagcgcagcaaacatcctccgttgaacatacagacccacaatcctccggctcgatccagggcaataccatcgggacgtccaagtcctgccggggtttcggcgaagcgcattacggcctccagttccccgttgggagtgtatgcggcccgaaatattgaacgtgcgatggaatcgacaaagaacagcgtgtggccatcttccgaccaggccaggccattaggcagcgcgatattcctctggatggtttgggcgttcagttcactgtcatagcggtacagcgctccggcctcacggttcggcccctcgtgcatcaggccggtaataaagcgtccttgcggatcgcaggccccgtcgttgaaccgatagcagcctttgttatggacagcggtagagtgcgtgcggaccacgccttccttgggatccagaatggcaacccgcgtatcttcggtgaagatcagattgcctctatccgtaagggccaaggcaccgatgcgcgccgtcgattgatagacggatgccactcgtgcttgcggggtcatgacgttaatcttgccaccagagatatcgacgaagtacaaaaggcggttgtctttatcccagactggactctcgccaaggtcggcacggacttcggcgatcttgtgcagacgacactcgtcacgcatcgccaaactccttgatgcgcggccaattgtgggcgacatcctccacgctggcacactcaattcgcgacagatccgtaggataggttacgccggggttttcacaaaagcgggttgcagtgaactgaccgttgctggcgcgcaggataacgcctgtgtcctgacataacgagctggccagatacagcaagcccggcaccacccactcgggttttaggtctgtgggtggctgtgtgatcccccacatacgggtcttggctactggagagatggcgttgaccagaatgccgtccggttttccttccatactcagggcattcatgatgcccacttgggccatcttgccagcggcgtaggccgtcaggcctggctgcgcgtagcgttgatacatggcacggtcagaggttgtcagcacgatccgtgatgatggggaaagcttgagatgcgcccaggcgtgcttgctcaaccagatcggcgtacgcacgttgatgccaagggagcgctcaaggaattcctcttcctgtgtctcaatgggctgatagccgacccaacccgcgttgtggatcaggatatccagcgcgccgaattgctcgatggccagcgctacgagttgttggcagccatcctcgttatccaggcgcccgctgtgggtgatgaacgatccaccgtcgacctgcaaggcatgtatcgcctcgctcatcacgtctgggtcagccccgtctccggtaaggctggttcccaggtcgctaacgattacccgtgcgccacgctccaagagggccttggcgtaagctttcccaagtccccggccaccgccagtgacaatcgctaccttgtctttgaacggctcgtttaagcgtcgatctgtcatcatgtacctccgtttggcaatagcacgatgatggagcgaccgctcctgagtgtaaaatatcttatttgtaccgaaacaagacttatcaggtttcaatcaagggcgagatgccatggcatctcgcacctcatcgatcagtttgtctcgaataggacaaggcgagtgcgggttccaagccatcagaaattctacatgccgcagtgcgtctggtgcattgacctggattggccggaataccacgtctttgcgaccctcctgcgccaacgacgcgggcaacagtgcaacgccgaagccgctggccaccaaagcaaccagagtttgcagctgacgcgcctgttgagcaatgcatggtatgaaccctgctgctgcgcaaagctgaaccagctggtcatggaagccctggcccaggtgccgtggtgacgatacgaaggcgtcatctcgcagtgcggccagtggaatgatctcatggcacgcgagagggtgtgtggctggcaggccaatcatgatgggttctcgcagaatggactcgaagcgcagctccggagccgtcctgcccggtgacctcatgaaaccgagctcggcgcggccatgttccagtgcctcgacctgctcttgagtcgtggcctcacgcatcgtgaaggagatggcggggaatgcagagcggaagcgctgcaatgcgcctagcaatgcgtcatagggggcgatattaatgaaggttaacgtgagatggccttcgatgccttgcgcgactcgcctggtctgttcgacgccttcatcaagcaggcgcaacacctttcttgccgttgccagaaagtcggttccagcaggcgtgagcgacacgctgcgattggtgcgttcaaacaggggagcgccgatctcatgctccaaccgacgaatagcctgactcaacgggggttgtgccatatgcagccgttgtgctgcgcgattgaagtgtaattcctcggcgacggcgatgaactgatgtagcaggcgcgtttcaatcataatgggctccacggatcctatttgctacacactaatactaatgagatatcattggcagtcctggcgaaaaaaaaccggcgcctgggcgccggttcagtttgcggatcagtctagtattaccggtgagccagttccgtttcgtcttcgctgtccataatggctttgtcggtctgcttcatcagttggctggtgacggtacctgcggtcatcgaaccactaacgttcagcgcggtacggcccatgtcgatcaacggttcaaccgaaatcagcagggcgaccagggtcaccggcaggcccatcgctggtagcacaatcagcgcagcaaaggtcgcgccgccgcccacaccggcaacaccggctgaactgacggtaacaatgccgaccagcgttgcgatccacagtggatcaagcgggttgatacccacggttggcgcaaccatcaccgccagcattgccgggtagagacccgcgcaaccgttctgaccaatagtggcaccaaaggacgctgagaagctggcaatcgactccggcacgcccagacggcgagtctgcgcttcgacgttcagcgggatgctggcagcgctggaacggctggtgaaggcaaaggtcagcaccggccacgccttgcggaagaatttcagcgggttaacgccggttaagctcagcagcagaccgtgaaccacgaacatgatcgccagaccaaggtaagaggcaaccacaaagctgcccagcttgataatgtcgtggatattggagccagcaacgaccttggtcatcaacgccagtacgccgtaaggagtcagcttcatcaccagacggaccagcttcatcacccaggcttgcagggtatcgatagctaccagcacgcgctggcctttcggttggtcatctttaagcagttgcagagaagccacaccgaggaaggcagcgaaaatcaccacgctgatgattgacgttgggttagccccggtcagatcggcaaacggatttttcggcacaaatgacaggatcaattgtggcacactcagatcggccactttacccgcgtagttggtttcaatcgccgacaaacgagccgtttcttgtgtgccctggaccagaccctctgcggtcaacccgaataggttggtgaccaatacgcccaccagtgcggcaatcagcgtggtaaacagcagggtaccaatggtcaggaagctgattttccccagtgaagaagcgttatgcaacttggctaccgcgctcaggatagaggcgaaaaccagcggcatcacgatcatttgcagcagctgtacatagccgttaccgacgatgttaaaccagccgatggactctttcagcaccgggttgtccgagccgtataccagttgcagtgccaaaccgaacaccacacccagtgccaggccaaccagcacttttttagccaggctccattgcttatggcgagtttgcgccaacagcaaaaggagggcggcaaaaaccagcacgtttaatacgagcggtagattcatccccagtttctccaatcttgttttcttataataaaaggtgccacgcaccgatgtaatgcgatgtaaatatcctaacagtttgcggtgcagcgcacttatatccaaaaagaatttaatataacttttggattaaaaacggtgatgtaatgagcgggaaggtggaaaaataggcgttattttgtgatcacagtctaatattttttatttgctcaaaataggactgcaccggaagagtgtaatccccttgccagtaaatggcgaaagccaccaggcatagacacagcacccgctccagctggttgcctttttgtgaattcaatattggcaagcagaaacgccagcggcagggccaaagtaacggcacgccggccggggtgagcatatcggccagcaggtggctgaaatacccgataatcatggcatgcagcacgtctgcggggatgggccaaccgcgcggcacttctagctgaaatagccacatgccgccgacgatcgccagcaggctatgggtgaaaccacggtggccaaaggcgcgtgagatcgggattgcgatccagcgcaggcgctggcccaggatcgatttagggtgatcgatatcgggtagcagtgacgtcagtaatgcggcaggaatgatgtgccaccaatcgccagcggcgagcacgggggtcacctccgctttcttggcaaagatcgcgcaggcaactgaaaatatgagatgtccttccgcggtcatgttgctatattccggctactaaactgttaatttatccagtatatgggaatttttacagttacggaagcggttaccctgtaacgagttgttaattttacgccgttttacaaagggttgaaacggcgtgcttgacgggtaagttacacagctaggctcgtaatgtaggggcgctgcaatgctgcgttcgctcaacttcgcgggaagataatgtcgcaaccggcctgcgccagcccaatcgcaatgccttgtcccaggccgatattgcagccggtgaacagcgccacctttcccattaagtcgaaggaattcagaatgatagcattgctctctagccgtgagggaagaaagcaccgggcttacgacggctactgcgtggcagtgacagtgtcaccgattcgcccggtgttttctttatgcgattagcataatttgaatgggatgttaattcaataaaaatgaaattacgttttgtttttttggagaaagggcaccggcaggaccgatgccgtcaaggtcaggccaggtgggcggcggtcaactgctcgaggctttgcaacttaaggtcagccaaggcccagcgcggatcctggctgtattcgtgcgcagggatcacgatcgatttcatacgcgccgctttggtggcaatcataccgttgaaggagtcttccagagtaatgcagtgctgtggatcgctgcccaggcgttcggcggcgatcagatagacttccgggtgaggtttgctgtagggcaggtattcggccgagaccaactgatcgaaatagctctccagatcgaacatcttcagcacctgctgctgcatatatagcggagaggcggaggccagcccaatattcaaatccaggctacggcacagttccagcgcttgttgcaccccaggcagcaacgggcgcttttcccgtaccaactcgatggcccgctcgataatgcggccagcgacttcctcctgagaggggccttgccacggcatggcctggaaccacatccgcaccaccagatcgatgcgtaaacctagcgtatccggaagtttgtgacggtcagacagatccagccccaatgagctgaaaatgtccatttccgcctgtaaccataggggttcagagtcgatcagtagaccgtccatatcaaaaattgcgcttgctatgcgttgcgaataagccattaacaattaactcctgcagcaccagtaaaagaaaatgttttcgccactctatcatttttgttcaggcacctgcacccttcgggccggggggttatctcaaagtgctggatctcactggattcagactggaagacgaagaaaacggtgggcgagtttcattaactacaggtagacttagcgcaacaacggttacgtcgcttacaaggggaacacatgacgtatcaacaggctgggcgcgtcgccatcttgaaacgcattttcggatgggtcgttttcatcccggcgttactttcaacgctggtttcactgctgggttttgtttatcaacacagtgagaagtccagagggatcaacgccgtgatgctggattttgtccacgttatggtcgacatggtgcgcttcaatacgccattcctgaatattttctggtacaactcaccggtaccggacgtggataagagcctgtttagcggcgctaatctgatgtttatcattatctatttcctgatttttgtcggcctggcattgcagacttccggtgcgcgcatgtcgcgtcaggtgaagtttatccgtgagggactggaagatcagatgatcctcgaacaggccaagggcagcgaagggcacacgcgtgagcaattggaagagcgggtgacgttgccgcaccacaccatcttgctgcaatacttcccgctgtatatcttgccggtggtgatcgccgtggtggcttattttgtgctcaagttgctagggcaaatggccggagtggcctagatctgaaattaaagggcggcacctatgtgccaccctttatattacagcgtttctggatggagcaacttgtcgatggcccgttgtgccatgaccagatgttgcccgccaaacaggttgctgcgattgagcagataatacaactgatacagcggttgacgttctataaacccggcctccagcggccacacgctctgatagccgtcataaatctgggcgggcaaatcgggataaagcggcagcatcgccaaatcacactctctgtcgccccagtaacaggctggatcaaacagcaaaggcccatcggcggcctgagcacagttggcaggccacaaatcgccgtgcagcagggagggctgtggctgatggttttgcaagcgtaggtacaccacgtcgataatttcgtcgatatcaccgaaggtcatgcccttttccgctgccagctgtagctgccagcctatgcgttgctcggcaaaaaattccgcccagcggcgttgccaggcgttgggctgcggcgtggtggaaagatggttatcgaagtcgaggccgaactgcggttgttcgctccattggtgcaggcgggccagctgttggccgagacagtgcgccccgtgcgcatccagcggcttaaggagttgatactccagcagcaggaaactgtaatcgcgatcgctgccaaccccatacacttcggggacacgcacggtcttgctgcgcgccaacagcgccagttggtctgcctctgcggtgaatatcggcagcatttcgcgggcatcacatttaacaaacacctcgctgtcaccgtaactcacgcgccacgccgggtggatttctcccccaggcagttcagtcctttcgcggatttctgcgctgccaagatgttcactcaacagacggctaacggcttgccacatagtaatccccttctgtgttgcctgcgatttcattaggttagcgtctttcctgcggcgaaaacacgatgtggcgcacagctgcgccatctattgacgaaaatatcatcgccgcgtgtctggtcaaagtatatacgctattgattaatttaagtacgtctcagcttgcaacttggcaaaagctcgacgatgtttagacgttactttcaaaccaatcaattttcacgggagtgggcaatggagccgagtcagcagtggcagcgcggtgagtttcgtatcaacagtgataaaagcgagttggacctggctgtcacccacgcttttttggcgactaccagttgggcgcaggggatctcgttggcaacggtgcagcagtcgatcgataacagcctgtgttttggcctttatcatcagcgccagcagattggttttgcccggctggtgacggactactccacgttcggctatttgtgtgacgtgttcgtcatccccgagtttacgcggcaggggctggccaaatggttgatggcctgcatgctggagcatccggtgttacaacgcttgcggcgcattatgttggtgaccagcagtgccccggggctgtatcaacaggtaggctatcagccggtcaataagcaggactttgtctggcagatcgcacggcccgatatttatcagcagcaataaatgggcgccgcatgcggcgcctacgggttggttttaactacggtgatttcgtgacgttgcacgggtttgaagtggctatagagcagggcgatgacaaacagcagcgcctgcacgatcacgatgcacggcccggttgcgccgtcgatatgaaagctgatcagagtgcccagcacgcaggaaaaaaccgaagcgacggtggcgacgatcagcatccggttgaaactgcggcacagggtgaatgcaatgatccccggtgcgatcagcatcgcaatcaccaggatcactcccaccgcctgtagcgaggccacaatggttaacgctagcaggcacagtaagccgtagtgcagtaacttcactggcagaccaatgacgcgcgcatggttcggatcgaaacagtagagcataaagtcctggcgcttgagcagcacgatcgccagcgtgatcccggcgatccacaatgtttgctgcagttcaccgtcggtgatccccagcatattgccgaacaggatatggctgaggtgttgatcggtatctatgcgggcaaacagcaccagcccaaaggcaaacatgcccgagaatacgatccccatcaccgtatcctcctttacccggctgtgttctttcagataacccgtcgcgaccgcgcagaaaatgccggaaagaaatgcgccaatcgccagcggaatactgaacacaaaggccagcacgatgccgggaagcacagcgtgagaaatggcatctcccatcagtgaccagcccttcaacaccagataacaagacagcacggcgcagacgacaccggtgacgatagccgcgatgatggcgcgctgcataaagggataggcaaacggctcagagaaccattgcaacaggagttccatcagttgccctccggagaattgccacgggtgacgcggcgttttgaggctaacagcccgtgcttcggtgcgaacaggaaggccgccaggaacaccagcgtttgcaacgtgacgatcacgccgccggttgccccgtcgacgaagaaactaagataggcacccaggccgctggtcaaggcgccgatcgcgatggcgataatcagcagccgaccaaaacggtcggtcagcagataggcggtagcaccgggagtgatcaccatggcgatcaccagaatggcgccgacggtttgcagcgcagccacggtgcaggcgctaagcagggtaaagaacaggatcttcaactttaatggcgaaagcccgatcgataccgcgtggttctcgtcgaaaaataccgccagcaggtctttccacaccaggcataagatcagtaacgaaacgccgataataatctccacctgtaacacgtcttcatctgcgataccgagaatattgccgaagatgatcgactgcacgttcaccgaggtgggattgagtgaaataatcaacaggccgacggcgaaaaaggtggagaaaataaagccgataatcgcatcctcgcgcaggcgggtaacgtggcgtaccaacgtcatcgccagcgcggccaacataccagtgaaaaatgcaccggctgcatagggcaggccaagggcataggcaccggccacgccaggcaccacggagtgggaaagcgcatcccccatcaacgaccagcctttcagcatcagatacgccgacagaaaagcgcaggccgcaccgacgatggcgctgacccacatcgccttgaccatgtagttgtagttgaacggctgtagcaggagttcgagcatcagggattattctccttttgctgactttgcgctggaggatcgctcttggtatggccataaaacaccgcagggcgttcgtcatcggttaatacggtcacggtgcggggatcgttgtcatcgtgcaaatcgggcccggagaggttgatatggcgcaatacaccaccgaatgccagttccagattgctttgcgtgaacgtggtctcgagcgggccggcggccagcacggtacggttaatcaggatcacccgatcgcaaaactccggcacgctgccaaggttgtgggtcgataccaggatcaggtgtccctcatcgcgcagcgaacgtaacagctcgataatggcgttctcggttttgacatccacgccggtaaaaggctcatcaagcagtagcaccgttccctgctgagccagggcacgggccaggaatacacgttttttttgcccgccggaaagttcgccgatctgtcggctacgcagctcactcaggccaacgcgctccaaggccttatcgacccgtagccggtcttccttggtaggaatgcgcaagaagttcattttgccgtagcggcccatcatcaccacgtcttccaccagcaccgggaagttccagtcaacttcttcggtttgcggcacgtaggcgataatatttttctttagcgcggcgacaaccggttgcccgctcagcatcacttggccagatgtcggttttaccaggcccatgatgcttttgaagagggtcgattttccgctgccgttaacccccaccagcgcacagatcgaaccaccgctaagggtaaaactggcgttatggatcgccgtatggccgttgttataggtgaccgatacgtcatccacgctgagctcagggcggataaaggtctctgcactcattgattgaatcctttggcgatggtctgcacggtggcattgagcagatcgatataggtgggcaccggcccgtcggcggcagacagcgaatcgacgtacagcacgccgccgtattgtgcgccggtttctttggccacctgcttggcaggtttatccgaaatggtgctttcgctgaacaccaccggaatgtggttggcccgcacggtatcaatcacccggcgcacctgctgcggtgaaccctgttcgtctgcgttgatcggccacagatagacttcttgcagttgataatctttggcgagatagctaaaggcaccttcgctggttaccagccagcgctgggctgacggaatacgcgacaaacgctcgcgtagcggggcatccagcgccgcgattttttcagcgtaggctttggcattgcggttataggtttccgcgttatcaggatcgtgctgtaccagcgctttgcggatgttctcgatgtagatcagcgcattgcttggcgacatccaggcatgggggtttggattaccgttatacgggccttcgtggatcggcagcggggtgatcccctcggtcactacggcggcgggcacttgtttgatattttcgaagaaacgttggaaccagcgctccaggttcattccgttccataaaatcagatcggcgtgctgtgccttaacgatatcgcgcggcgtgggctgatagtcgtggatttccgccccaggcttggtgatggactctaccaccgcggcgtcgcccgccacgttctgggcgatatcctggataatggtgaaggttgtcaccacgcgcagcttgtcctttgccaaagccggttggctcacagcaataacgctgaggcatacgcagagcagggcaagggggcgaaagtgggacaagctaaaacgacgacgagtaaatacgttgtttttcattggcatgatgacgtctcctgattcaaatgaaaatgattatcaatatcaattgagcggaagtcaagcatcacccagctttgccaaggggttagtttgttgttaatgaaatagtaccgccgtgtgagttataacattttatgtatcgggatgtaaccgcttaaagtagtcactgccagtgactatctccacctcgggttttgcccccaatgccacctcgcccaatccctgtgccaactgttttacatcttcttgatttaatggcgttgttagcgaaaaactgttgatccccagctcatggggtacgccattgctgtcgctaagcatggtggaaaaaccggccagcgtcatttgtccggttaatttggctaaatcggttaagctctgttccggataggtgaaagacaccacaaatcctatggacgaagattgactcataaatcacctcttggtatatggatagcctgagaatagaccaaaaaagttatgcaggtatccttaccagttgtatatgctacgcaactcattgaaaggagtgagggattctgtgaaaaccaaaataggttgcctgatggcaatcgtactattagccggttgtgcgaaagatccgcaaacaaccggcaaccagacaggcagtggcacttcgggcggttggctaaaaaccccaccgcaaacatcaagcaaccgtaccggtacaccggtcgcttataacgattatatccgtcaggccgccagcaactatggcgtcgatgaaacgctgattaaggcgatcattcaggtggagtccgggtttaacccgaatgtggtcagcacctcgaatgccgtggggctcatgcagctgaaagcctcaaccgctggacgtgatgcttaccgtatgaagggaaagaacggacagccaagttcacgtgagttgaaggatccggcggtcaatattgatctgggaacagcctatatcaatattcttcaaagccagcagctagccgggatcactaatccacaaacgttacgttatgccaccatcgtttcctatgtgaacggggctggcgcgatgttacggaccttctcatcagataaacgtgtggcggtaaaccgcatcaatcagatgagcccggacgagttttatcagcatatccagaagaagcacccggcaccgcaagcgccgcgttacttgtggaaggttaccaccgcttatcaagcgatggcctactagcctaagattgtctacggctggcctcgctaaggggccggttttgctatttcttgccggtaaaaatgtgctacacatcccatttccgctgttctcccgccttttgaactaaaaaaccgcacaaattgttaattttacattaacaaagaaaactttacgctcaatcaaatagttaccggtaacatcgctgccaaagctcacattctgaccttcaaaaaataaacaattacgtaacaatatatgtttaaactccgtatagaccgcgaggttgaggttaaatagttgtgattttttttggaaggaatgtgctatgtcgaacgataaaaccaacaactcccggcgtgatttcttgctgaagtcgatgacgctgatccccgcagccgttatcggtggcagcggtgtgagtgccctgacggcggccacaccggtgcttgccgctagcaatactcccaagcagactgactatcaacctactttctttacccccgaagagtgggcctttgttcaggcggcggttgcgcgtttgatccctgcggacgagcgcggcccgggcgctttggaagccggcgtgccggagtttatcgatcggcagatgaatacgccttatgccaccggttcaatctggtacatgcaagggccgttcaatcccgatgtcgcaccggaaatgggttatcaactaccgttggtgccgaaacagatttataacctcggtatcagcgatgcggatgcctacagcaagaaaacgacaggtaaagtattcgccgagctggatggcgcacaacaggatgcgctgttgcagaagttcgaatccggtgaggccgattttgcgcaactgcctgccaagctgttcttctcttatctattgcaaaatacccgtgaaggttttttcagcgatccgatccatggcggtaacaaagaaatggtgggatggaagctgattaattttccgggcgcacgcgctgactttatggactgggttgagcgaggggaacgttatcccttcccaccggtatcgattcgtggggagagaggataattatggcaacggtaatgaagaagcaggatgtggtgatcgtcggttttggttgggttggtgccattatggccaaggagttgaccgaggccgggctgaacgtggtggcgcttgagcgtggcccgatgcgcgatacctacccagacggctcctacccgcaggtgatcgatgagctgacctataatatccgccgtaagctcttccaggacctttccaaaagtacggtgaccatccgtcacaacagcagccaaaccgcagtgccttatcgccagttggcggctttcctgccaggcaccggcgtgggtggagcgggtctgcactggtctggcgtgcatttccgtatcgatcctatcgagctgcgtatgcgcagccattatgaagagcgctacggcaaaagttttattccaaaagacatgacgatccaggattttggggtgagctacgacgagctggagccgttcttcgataaggccgagaaggtattcggcacctcaggcactgcctggtcggtgaaggggcagttggtgggtaaagacaaaggcggaaacccctttgcgccagaccgttccgaccatttcccactgccagcgcagaagaacaccttctccgcgcagctgtttgaaaaggcggcgcgtgaagtgggttatcacccttacaatctgccctctgccaatacctcagattcctataccaacccctatggcgcgcagatgggtccttgcaacttctgcggttactgcagtggttatgcctgctacatgtattccaaggcctcgccaaacgtcaatatcctgccagcactgcgcatggagaagcgctttgagctgcgtaccaacgccaacgtgctgaaggttaacctgaccgccgacaaaagccgggcgaccggggtcaactatatcgatgcccaggggcgcgagattgaacaacctgccgatctggtgatcctcggagccttccagttccacaatgtgcacctgatgctgctctccggcattggcaaaccttacgacccacagaccggtgaaggggtggttgggcgtaattttgcctaccagaacatgactaccatcaaggcgttcttcgataaggatgtccacaccaacccgtttatcggcgctggcggcaacggcgtcggtgtggatgattttaacgcggataactttgaccacggcaaagaaggctttgtcggtggctcaccattctgggttaaccaggcgggtaccaaaccgatctccggcctgccgacgcctcctggcactccagcctggggcagcaagtggaaagccgcggtggcggatgcttatacgcaccatgtctctatggatgcgcatggcgcgcaccagtcttatcgtagcaattacctcgatctcgatccgacctataaaaacgtctttggtcaacctctgctacggatgaccttcgactggcaggaaaacgacatcaagatggcgcagtttatgtttaacaagatggctccgattgccaaggcgatgaacccgaaactgatttccggcagcccgaaaaatgccaacagccatttcgataccaccagctatcaaactacgcacatgaacggcggtgcggtgatgggagaagatcccaagaccagcgcggtaaaccgttatctgcaaagctgggacgtgcataacgtgttctcgatcggcgcatcggccttcccgcaggggctaggctacaacccgaccggcaccgttgccgcgttggcctattggtctgcccgtgccattcgcgagcagtatctgaaaaacccaggcccattggtgcaggcatgaggaggcgagtgatgaaagctttggttcccgcactggttctcagtgcactgagtttttccgttttggcgcaggacgcggcggtcagcagcgaattgctcaaacggggtgaatatctggcacgtgccggtgactgtgtggcctgtcataccaatggtaaagacggcgtgccctttgcgggtggtttggcgatggaaacgccgattggcactctctattccaccaacatcaccccggacaaaactaccgggattggcgattacagttttgaagatttcgacaatgcggtacgtaaaggtgtcgccaagaacggcagcactctgtacccggcgatgccttatccttcttttgcgctggtaaaagaggaggatatgcgtgccatgtacgcctatttcatgcacggcgtgcaacccgtcgaacaagcgaacaaagactccgatattccctggccgctatccatgcgttggccattgcacatctggcgttcgatgtttgcacccacgcctgccgatttcgcggcaaacgctaacgccgatccggttatcgaacgtggtcgctatctggtcgaaggccttgggcactgtggggcatgtcatacgccgcgtagcctgaccatgcaagagaaagcattgagcaacacggaaggggatgactacctgtctggcagtaacgcgccgatcgacggttgggtggcatccagcctgcgtggcgataataaagatggcctaggcacctggagcgagagtgaactgaccgagttcctgaaaaccggccgcaacgataagtctgtggtttttggtggcatgagcgacgtgatcgaacatagcctgcaatatctcagcgatgaggatttgaccgcgatcgcccgctatctgaaaaccttaccgccgaaagacggtaaacagcaggccgcaccggttgaagacagcgttgccaaagatttgtggcgtggtaacgacagtaagcccggagccgcgctgtacgtcgataactgcgccgcttgtcatcgtaccgatggtgttggttacaagcgcgccttcccggcgctgaagggcaacccggtggtgcagaccgaagacgcgacttcgctgatccacattgtgttggtcggcaataccacgccagcggtgaagggagcagtttccaatctcaccatgccgccgtttggctggcgcttgaacgaccagcaggtggcggacgtggtgaactttatccgttcgagctgggggaacaatgccaaggccatcagtgcctccgatgtggctgacgtgcgtaaggatcgttcaataatccgctatgagaaggcgatgggcagttctgctgtcccagagccagcgccgctgggtgccaagtaagcttcccaagggcctcgttcgaggccctttttacggcaggctgggcctgccttctgacattaactctatgttttatcagcattacagatatctgtaagccgccaaaaacaactcaagtgtggacagtatgtggacgctaaacggcgactttgccctgcaatgggttgaacgaaatagcatcgttcaggaagtccggcgaaaagtgtgcatatgtcattgtctgagtgattttggcatggcccaaaatgcgttgcagagtcacaatattccctccgttcatcatgaagtgcgttgcgaacgtgtgacgcaaaacatgcgtcgcttgtcctttcggtaaatctggctttatcgtcctaatcagcgtgcggaaagcgtcataacttgcatctgggaataacttgcctgtttttcgagtgaacagggcctctctaacatcctcagaaaccggcacagaacgccttttaccggttttggtatgtacaaaagtcactttgccgccgatgacgttttcaacacgtaattggctagcctctccccatcgtgcgccggtgcttaaacacaagactgcaattttgtagttatcaccttccgcgctcgcaagcaggtgttcgatctcgggttgtaaaagaaatcccatagacgtcggggcttccttgagtttgtttatcccgcgcaatgggtgaacgccgtggtataagcctgcctcaatcaggaaagtgaacatccccgatagaacaacaagattacggttaagcgtagaagcctggtcaccctcgctcagtctcaatactcgatagttagcaagacgccttttatctatttggaaagccgcagggtagtccatacttcggttgatcttgttgagtttgtaacgataagactggccatggtctatggtcttaccgtgatacacccaccaaagctcaattagctcagataaagaccgcttatctgttggctttgctagccaccccttgtcgtgataattcacaagcgtgtacttctcaaaagcttgtgcttcgtgcttcttgtcaaatctccggcggatacgctttccgttgcgcccgttcggnnnnnnnnnnnnnnnnnnnnnnnnnnnnnnnnnnnngaggaagattttacttttagggatacagcaagctgttacccgaaagttttggaatagataagctagatgaatatttaaccagtcttttggtcggagnnnnnnnnnnnnnnnnnnnnnnntgctatttgcccggattctggtgctatttggtcagtcataaaccacagtgtatatttgctaaacctaggaatattaaggattttcttaatggcgttaaggcttatttccttcgttccgttctcatagcttgataaagagctgtatggaacccctgacaactcactgatttgtttgcgatttagccgttctgactcacgcatcagctttagtttctctgcattgtctattgacataaaaacctcttcaggtaaatattatcccatcggatatattgaatatccatttgaagcaatcagaggccattacagaccactgattgctacgaacaaggagattagcagatgagtaaacagnnnnnnnnnnnnnnnnnnnnnnnnnnnnnnnnnnnnnnnnnnnnnnnnnnnnnngggcatgattgataagaacaagctgccagttgttgaaatgcgcactcctgggaagccaacggcacgtgctgaatgctgggtttatctccccgcatgga

SEQ ID NO: 303 - DNA, 31007 bp, unknown
  Altogen  635822 strain
  misc_feature (8131)..(8131): n is a, c, g, or t
  misc_feature (9887)..(9973): n is a, c, g, or t
  misc_feature (21899)..(21907): n is a, c, g, or t
aagcctttgtcatttatgctaatgtcgtgtctcagcaaaagcttacccagggaaaaatatggaacataaactggacgactttatccgccatgcgttaagcgcccaaccgatcagcggcacctcgctgatcatctcactctacggcgatgcgctgagccatcgcggtggtgagatttggctgggcagcttaagcgcactgatggaagccctgggcttcggcgatcgttttgtccgtacctcagtgtttcgtttgcaaaaagagggttggctggacgtagaaaagattgggcggcgcagctattaccgcgttaccgaacaggggatgcgccagtttcgccatgccgaatccaaaatctaccttagcgaacaaccgcaatgggatggcaagtgggagctactgctgttggaaagtgcggaaaaaaccgagcgcgcacggctgaaaaaagagctgggctggctgggctttggccagatcgccaacaacctgatggccgcccctacccatgcgcaaaccgacgtcaccgccctgcttggcgagctcaacgccagtgaacaggtgatctacttccgtgccgactatccctataaccgttccgaacagacgctgcggcaaatggtcgccaactgctggtcgttgagcgaggtggccggttactaccatgagtttatcgtctccttccgcccgttgatagccttactgcgcgaagccgacgagcaggaactgacgcccctgcgatgctttcagattaagctattgttaatccactttttccgccgcgtggtgttgaaagatcccctgctgcctgatgccctgttacccgctcaatgggaaggccaaatagcccgcaacctgtgcatcaatatctatcagcgagtggatcgcgccgcgacggaatatgtcagcgccttggcagaaacctccatcggcaccttacctgcacccagtgccggttactatcgccgctttggcggactgccgcgcgatcccactacattttaaggagtttgtgctatgcccgtgtatcagattgacggtttgacgccggtggtcgatcccagcagctatgttcaccccaccgcggtactgattggcgacgtgattatcggcaaaggcgtctacatcggccccaatgccagcctgcgcggcgactttggacgcattgtggtcgaagacggtgccaacgtgcaggataactgcgtaatgcacggcttcccgctgcaagacacggtggtggaacaagatgggcatatcggccacagcgccatactgcacggctgccgcgtgcgccgtaacgcgatgatcggcatgaatgccgtcatcatggacggtgcggtcattggtgagaactccatcgtcggcgcgggttccttcgtcaaggccgccgcagagattgccgccaaccaactggtgatcggcagcccggcaagggtgatccgcgagctgaccgaacaggaattagtctggaaacgcacgggtacgctccagtatcaggagttggtcttacgctgcaaaaacagcctgaaagaagtggcccccctcactgaaccagagccagggcgccaacgcctaaacttcgacgaccacatcatccccaaaagccagctttagctgttggccgggccgcagcccggtcaacattactccataccctgcaccggtgcttcagttgcaaccgatgcctgccctcgtcgactgtagaaatagatagctaccaacagcgcagtgaacgggatgccaaaccacagcgtcattctaaagaagtccgtgaacaacgtggttatcatcaagccggccatcagcagcgcccccgccaaggtaaagtaaggataaccccacatgcggaacttgagatgcgtctgcgtatgctggcggcggaagaacaggtgggtaacaaagatcatcaaccaggtgaaacaggcaccgtataccgaaatcgacatcatcaccgcaaaggatttctctggagcggcaatactcagcacgatagagacaataatccccacgcaggagagcgccagcgcgttgaccggaataccccgtttgctaagccgccccagcgccgccggagcctgcccggcacgggacagtgaaaacatcatccgggtggtgatatacaactggctgttcatggcagacagtgccgcaatcagtaccacaaagttaaagatcccggcggcggctggcagatggatcacgttcatcgccaccaggaacgggctttcaccggtgccagactgccgccacggcacgatggccagcatcagcgctatcgacatcatatagaagataaacagccgcagaatggtgcctttaaacgcgcttttcacggcaaccaccggatttttcgcttcccctgcggcaaccgcgatcatctcaatactcagatagctgaatatcgatacgatcaccgcaaaccacatgcctttcaccccaaacggaaaaaagccgccgttgtcggtgaagttacggatgccgaaggtcgggttagcggaaaacgccaggataccgatgccaatcaggataaaggctgaaatggccaccaccttgacggtagagagggcgtactccacctggccaaaagacttgaccccaaccacgttgacgacgatcaccgccgccgagaacaacagtacccacggccagatcggcgtgcctgggaaccagaactgcatatacatgccgatggcggtcacctcagtgcccaccgccaacaccacgcaagaccaataggaatagcgcaccagaaagccaaacagcgggctgaggtagaactcggcatagtcgccgaacgatcctggggttgggtgctcagaggtcatttccgccagacatcccatcagcagtagcgcaatcaccccgccgataaaatagctcagcagtacgcttggcccagccatctggatcgcgtaagcactccccagaaacaggccggtaccgatggccccaccgatcgccagcatcgacatctgtccggcggtcaggtgttttttcagcccatcctgccgctgggcgatagcgtcaaaacgtttcgcatctttcatggttgctcacctttttatgcggtacgggtaacgtcaaggatggcggcggtcacatagtccaggttttgctggttcaggccaggcagacacatcctgccgggcgccaccagataaatggaatattgctgccgcagttggccgagctggcgttcattcaacccggtgtagctgaacatgcccttttgatcgcggatgcgggtatagtccagcgtggtaccgccctgctccaggccagcagccaggccaacgcgcatctgtttgatgcgttgacgcatggtggtcaactcactggcccactgttggtatagctgcgggtccgccagcagggtttccacaatttggctaccgtgtgtcggcgggcaggaataactgcgacggatcagcgttttcaatgcgcccttcacgttcaccgcagcctctgccgtagcacagcgcaccgatagtccccctaaacgctggccatacagcgccacgttcttggaaaaagaattgctgaccagaaagtccacgtcggttttcaacatcgcccgcagcgcgaagcagtcttcttcaagcccgtcgccaaagccttgataagcgatgtcaaagaaaggcaacagccgacgccgttgcaccacctcgatcaccgcttgccattgtgctgggctgagatcggtaccggtggggttatggcagcaaggatgcagtagcaccaccgccccttccggcaaggcagagagcgtgtcgagcatggctgcaaaacgcagttcaccagacgcatcatcaaaatacgggtaggtattcaccttcaagccagccccttcgaagatcgcccagtggttggcccaggtcggatcggagacccagatttcgcggcgcgccagatagtgataaataaaatcggcacccagcttcagcgcgccagagccacctacgctttgcaccgtggcaatacggtccgctggttcaccaaacagcaacgtctggatctggcgggcaaacagtgcagaaccttcgattggcgggtaagtatgtggccgctgttgttccagtaaacgctgttcggcaatatggacggcctgcatcaggggaatattaccctgatgatcgtaatacagaccaatacccaagttaaccttttgcggattagcatcctgcatataggcttccatcagtgacataataggatcgggcgttgacggggtaatatgatcgaacatagattatccttaactcattatgtaatgaatcagcaggtgaatattattttatgagaattaattacgctgtagcgctaacggtgatttctattttcatccccggcaccactaacttatcaacaatcaccgtggagcggttgggatacggataattaaaatactgttggtagattttatcgagcagcttaacgtcattaacatcggtaagataaacaataacctgtaatacattatcactatggctattggcagctttcagcgtggtagctaaattatcaaacgtcagcgtaatctgtttttccgggtcgccagtttcaatagtgccatcctggcggaccgggccatgggcggtgaataacatcccgccacctttggttgcccaggaaaaaggttgcccgatctctggcaggccggtttcaatgactgtgcgcatcaaggtactctccatcggtaagcaggaaacggtgcagagcgccatcggcagcaaagaccgcgtccagcacactgtaatgattagcaccggggagcgcatagcggctaaccggcagcccctgcgcccgcaatgcggaataataataaagcgattgtccaatcagctcaggcagctctgccgcgccgtaaaatagcaccatgggcttcaaagatggcggcatattacgcgccgggcttaaggcctctatctgccgagtggtcagctttagctgctggtttacgtagctcgccagcagcggctgcaactcaaaaataccgctgatgggaaacaccgcctgcaccagcggatggtgttgccaatacgccgccagatgcccaccagcagaatgaccggtgagataaaccggcttatcgccacgcggcttcagccgacgctcgatggcatccagcgccgcccctatttgctggcaaatatcgtccaggttaaccgccggtgccaaagtatattccaccagcaccacatcaaaacctaatgacaatggcgtgctggcaataaaagcaaaatcctgtttattacaaaattgccaatagccgccgtgaataaatattatcgtgcctttatattcttcagttgaataaaaccagtcaaaaacttcacgcggcgaattcccataagcaatattcaactcatggcgttgctgttggtaaactcgctgactgcgggattgaaatgagagcaggatctcgttttcatcagccaccgtcgtagcgttatcgtaactgcccgctagaagtttcatatattaaacttagtttattatttaagatgtgagttaactattagcaacatgttaaaatattgtcaagacggctgatacggcaatgcgtgatcggcgatataaatttaatttttcgggcaaaaagtttcactggttaaacatttcgagcttattttaaagtttcatccatgaaactcgaaaataaattgatgataaagaatgagtgggcacagcatacgtcgcccctacgggcgagccggttgtatttgcgcaatttggctgaggtgctgataggcgtaatcccaaaaggtacgcaccttcagcggcatgtattgcacgttatttgccaccagttgcaccggtactggctggggttcgtaggcggccaacaaccgcaccagcgtgccattggccagatcgtccgccacctgataagacagtagccgagcaatccccttgcctgctcgcactgccaacagttgagtttccacctcgttcaacaacaagcgcggtgtcaaacgtactcgctcaccgctttcattaggaccaaagcgccattcacctgacgtcggacgaagagtgccgacaatagtgtcatgatcgctcaactgcgccggttccagcggctccccgcgttgcgccagataggctgggctagccacggtgacacgtgtcacctctccgagcttacgcgccaccttggaggaatcttgtaaatgcccgatgcgcaccgccacgtccagcccttcatcgatcagctccagattgcggtcatttaactgcatatcgatctggatttgcgggtaacgttcgagaaaagccatcaccatcggtgccacgtgcttgcgcccgaactgcaccggcgaagtcatacgcagcagcccgctcagttgagcctctgcggtatccattaccgcgtcttgatagtcatgcaacagagcacgcgcgcgttcggctaagcgcaacctggcctttgtgggtgccagacgccgggtcgtgcgctccaccaaccgcgcaccaaaccgctgctccaaagaagcgatagctcgggtcaccgccggagcggaacggcgcagcttgcgggccgcaccggccaaactcccttgctggatcaccgccacaaaaatcgccaactcatccaaacgatccatagactattccgccaagtgaaattatcaattgccatcttcccggatacccatcatctggcgcaagagtattctggtcaggaagactatataaggagactcactatgcaaacgttgaaactgtacggcaccccggcctctggccattgccaccgcgtcgagctgctgctgcggatgctcgagctgccttatgagtattgcgaagccccagcgacggtgcgccaaagcgaggcgttcctgcggcttaatcccattgggcagatcccggtattactggccgatgggcaggtattgaccgacagcaacgccatcatggtgtacctggtgaaacgctatgcgcctgatagccactggttgccagaagatccgttggcggccgcccaggtgcaagcctggctttccaaagcggccggagaggtgcgctatggcccggcatcctgtcggatggtggtgcaattttctgcgccagagaactaccagtctgcacaagccatcagcgcacgctttttagcccagttagagcaacacttggcagaacgcgagtttttggcaacgtctttgccgacaattgccgatctggcctgttacagctacgtggcggtcgccccggaaggtgggctttccctcaagaccttcccggcaatccagcgctggttagatcgtattgccgctctgcccaggttcttccgtatgcctgcgttacccctgcctgaccaggctgtaggccaataacatgtctccctccatgtttcatcccgatgagcagttggctcaggttctggccggttttgatgcggtgagcgggaatatctacactgccatgcctgatcaacatcgcgagttctttgcacacctgccctacctgtttgttgccacactggatgaacggcaatggccggttgccacgttgttcagtgggcccgccggttttttgcgctcgccggatgaaacacatttgcggatcgtttcgccacgccgggcggacgatcctgctcaagtggcactctatcccggccagcccatcggcgcattaggattagatttcagtaaccgcaggcgcaaccgggttaacggcgtcattagccgcacggataaaaaccgcgtggagattgcggtgcaacaaagctttggtaactgcccacagtatatacaacggcgggagctgttcgccgagccgagcgtcgccgcacccattgagccgttgagttcgttagatgatcaggcccgacaactgatcgtgcaggcggatacctgctttgtggccagctatgctcacggtgatttagcgcaaggcggtatggatatctcgcatcgcggtggtaaaccgggcttcatccatctggctgacgaaaccctgtggataccggattttcgtggtaaccgctatatgaacacgctgggtaatctgttggctcagccacgggctgcactactgtttatcgattttacacacggggatattcttcatttgcaggggaaaacccagatcttatggcaggcagaaaaagcagccgtcgaaggggccgagcgntgccgagcgctactggcagtttgatatcaccagtgcgtggcgttttcgccaggcattgggctggcgcggcagaaacgttgagttctctccggcaacgttacgcacgggtatttggcaaaatcacgtagaaagctaagcgggcgcagtatgcggcgcccatccccattcagccacattgccacgctgtcatcaatctgcacagcaggatctatttttgctagctagcgccattttaaataaatccacgctgggttacagtgaaagtggagaagccctccagtgtacagtttgactcaaaggagcttgagtatgtttccagaataccgtgagttaatatcgcacctgaaatcaagccacccccgcttccagtcattgtttgataagcacaaccaactcgaccaccaaatctccaggttagaagggccagcaggcaacggctactctgacgaggtggttcgcttgaaaaaagagaagctacatattaaggatgagttacacaaaatactaaaggcagaggaagccgcagccaagtagcgcacgccggtccccgcgcaactgcggggatcaccgcttgagctccattaagcccatttgaataaaattgcttatttaacgcttcggattctattcttcgggactttggtcacagacaaacttaagcgtaagtgattgaatagtagcgcagagagggttttaaatcctcgcagtgggcaaagccctgacagtgtgcaaggtcatcccgttcgccaccccgttatctctgcgtgaaatgcttgctatagaacccccttttgcggcatgttgacgctatcagccccagccgaatgttccagtgacccttagagcaacgcaatgattaaatggccgtggaaagcaaatcaagcgcaggcggaaacgtttgccgactggcaggaagccctgtccatccccctgctctcaccgttggatgagcaagagcagcggcgtttggcagcggttgccagccagattttgcaaaataaacgtatcgtgcctttacaagggttggaactgacatccctgatgcaggcgcgtattgccctgctgtttgcgttgccggtgatggaactgggggcagaatgcctggacggttttaacgaagtcctgctctacccaacccccttcgtggtggaagatgaatggcaggatgatattggtctggtgcattccgggccggtggtacaagcgggccaaagctgggaacagggacctatcgtgctcaactggctagacgtgcaagactccttcgacctttccggtttcaacctggtgatccatgaagcggtgcacaagctggatatgcgtaatggcggtaccgccaccggcgtcccccccatcccgctgcgcgatattgccgcctgggaatacgacttgcacgccgcgatggaaaatctacaagacgaaatcgatatggtgggtgaagaggccgccagcatggatgcctacgccgccagcgatccggctgagtgcttcgccgtgctttccgagtatttctttagcgccccagagctgctggccaaccgcttccccacgttgtacgagcacttctgccgcttctacaaacaaaacccgctggcccgtttgcagcgttggtatgcagacagcgagccacaacggggctgagtttgctcagatgatgagctgtcgcacccccagaatcaattttgcgttgacacgatctgaacggctggatatgatgcgccccgttcacacaattcctctgtagttcagtcggtannnnnnnnnnnnnnnnnnnnnnnnnnnnnnnnnnnnnnnnnnnnnnnnnnnnnnnnnnnnnnnnnnnnnnnnnnnnnnnnnnnnnnnctgtgaagccatgccccccaaatcgaatcgccgatgacgcgagcaagctggcaccgccgggaagtctgaatacatgcatcatggtgcaatcttgcgctcatcgtggtgcattatagggtgacgaatattataaatatcaataaatcaacaagttgaaaactggcatgattcctgcgtgatcgccttgcagttattttacgacaaggagaaaacgttatgtcagcacatactgtggtaaatacacagcgtcgccaattattaaaactctcgggagctctagctggcactgtcacattggctggtctcagccaccctgcattgtcagaaacactccccgcaagtgataccttcgcggttcctactgccgataaacccattcgtattaactttaatgaaaatgcgctcggcatgtcacccaaagcacaggctgccgcacgtgatgccgtcaccaaagccaatcgttatgccaaggaagaaataatcaccctaagacacaagctagccagtcagtatcagataccagaaactggtattttactgacagcgggttcttcagaaggtatacgtgcgtcgatagaagcgtatgccacaccggactcacagttggtgatcccggaactgacttacggcgacggtgaacatttcgccgccattgcgggtatgaaaatcacaaaagtagcgatgcttgatggttggcaatttgatatcaacggattaaaacaagccgtagaaaagcataaaggcccgtcgctagtctatttggtcaatcccaacaacccgactgcaacgattactccggccgatctgatcgaaccctggattaatagcaaaccggctaacacgatatttattgttgatgaagcctatgcggaatttgttaacgacccccgttttcgttcagtttcaccattggtaaaacaaggtgccgataatgtgattctgttgaaaaccttttcgaagatttttgccatggccgggatgcgtgtcggttatgtggtggcacacccgacagtgattgcccgtcttgaaaattatgttgcaggagaaaaaatcaacttctgcggggtagatgccgctttggcttcaatggatgatcaagctttcattcgttacagcaaaaaaagcaatgatacctcgcgacaaattttactacaggctctggatacgctgaaaatcccttacctgccttccgagggaaattttgtttttcataagctggatgtgccgttgaaagactatcagcagcatatgaaagatgcggggattttaattggtcgggcatttccacctgcgcaaagctggtgccgaatttcgttagggacacctcaggaaatggcgtttgttgcaaaaaccatgctcgacttccgttccaagggctggatataacgaatggcccagaagcagtcagtattgctcctgggccagatttccccctctgcgacggatgctgtgggccccagattcactggctttactgaccatggatatgtgcataactcaatgacctttatcatatatcatttttatagccgttacactttagccgtaataattcatcatagtatcaaataaattttttaacgtaaccaagccaacctattattgagtttttcatttcttctatcgtattaaaattgaagttgccagtacacatatccgaattgaaatgaggtataaagttcacatccgaatagcaatttaacaaactttccgcatcatccattgaaataaggcgtgtaataaaatcagatgtttcatacattttactttctctgtatggattgctcattgttaactccgttgtattgtcaaatttataatatacccgataattttcaagatacatgtgactttgttgaataaatcggcgttaaaagttgactactgcgtcacctgatgatgggttttattgttgatgctttcccactatttagctaactaaatgtaaataaattgtttcccccagcctgcccggcgttccaataataaaaccatgttaattggaacgagtgtatgacatgtcttatcgaatcagcctgctggataaaagcccggttgcagcaacggaaaccgcgtctgatgccttgcagcgcacgctgtacctggcaaaacaggccgaaacctggggttatcatcgcttctggattgctgaacaccacaatagccctcacctcgccagcccttcaccggaactggtgattgcctggatccttggccagactcaccatatccgcgtgggttcaggcggcgtaatgctacagcactacagcccgtataaggtggctgaaaacttcaacctgctggcctcgttggcacctggccgtatcgatcttggcgtgggtaaggccccgggcggattgccattggcaactagggcgctgcaacaaggtcttcatcagcaagagaaaggctcgtttgccgaccagcttgcgcagcttgataactggctctctttgcccgccacagacgaaggagatgaagccgtgcgagccacccccaccccgtcgcatattgcagaccgtttcctgctaggagccagcaacgagagcgctttgctggcggcacagctggactggaacttcgttttcgcggctcatcttaatggcgataagtccctgatgagggaagtccttactacctggcgaaaccacagccaatgcgacacgctggtggccgtgcaggtgattgtggccgcgagcgaagctgaggcaaccgcgctggcggcacaggtggagatctggggggttgagcttgagaatggtcagcgtgtaaccgtggcaagtgaggctcaggcccaggcctttgcccgccaggcgggcagccctgcccgtctgattgaacaacgtacccgttctctgattacaggaaccgccgcaaccgtccatgcggagctttctaccttgcaacaggcgtttgggattgacgaattcatcatcgacaccccgatcgccgagggatcggcgcggatcgcttcattacgcctgctcgcagaaggtattgcgagctatgccaccgaaaatgaatccgcctaaagggtaaaagatgacatttgcacagcaactcattgactggcgacgcgagctgcatcgcaacccggaactttccggacaggaaatcgccaccaccgcgcggctgcgccactggctcgaatccgccgggctgcgtctactgccgtatgatctcgctacgggtgtcgtggccgaggttggcaagggcgagaaagtcatcgccttgcgtgcggatattgacgccttaccgattgaggaagcaacaggagcctcctttagttcacgccataaaggagtcatgcatgcctgtgggcacgatgttcacagcagcgtgatcctgggagcggcattgctgcttaaaaagcgtgaagcgcagcttgctggccgggtacggttgctgtttcaacctgcggaagaaaacttcaccggggccagaatgttgatacaagctggcgttctgcatgacgtgagcgctatttttggcatgcacaatgaacccggcctgccggtagggaccttcgccaccagaggaggtgccttttatgccaacgtcgatcgctttgtgattggcgtaaagggcaagggagcccatgcggcgcgcccgcatgaaggcgtggatgcaatcgtgctggccagccaactagtgacggcgttccagagtatcaccagccgcaacattaatacgcttgagtccgctattgtcagcgttacccgcattcaaggcggcaatacctggaacgtgttacccgaaaaggttgagctagagggcacgatacgcacgcactctgccgatgtacaacgccaggttgaaggacatatccggcagatcgcagccgggttggctgccgctttcggtgcagagattgaggtggcgtggtttgccggtccgaccatgctgatcaacgacgacaaatgggcagcctttgcaaccgaagtcgctcaggctgaagggtataaaacccagaccgccgccttgcatatggggggtgaggattttgccgcctatctgcaccaaatccccggggcgtttgtcagcatcggtagcgccagtgaatacggcctgcatcacccggcatttagccctgatgaagccttgattgaagacgccgcgcgctatttttcggcgttggccgaaagagcgctgcaagctatctgacagagtaaatcaatatcaaggggatctatatcccttggaaaatctattgtctgaaaatgaggggtaaacatgtcattaaaacgacaactgcgcctgggttcaatattacacggcgcgtctggcaatatgtccgcatggcgacacccggcagcacaggcagatgccagcattaattttgactttgtgaaaaatacggccatcaaggccgaagagggaaagcttgatttcctgtttgtggctgacggcctttacattaatgagaaatccataccacattttttaaatcgctttgagccactgacggtattatctgcactcgccgccattaccagccgtttgggattggtgggcaccgtatcgacgtcctacagtgaacccttcaccgtggctcgtcaatttgccagcctggaccatctgagcaacggcagagctggctggaacgtagtgacctcaccgctggaaggctcggcaaaaaacttttcccgcgaaaagcatcctgagcatgcattgcgttaccgcattgccgatgaatacctggatgtggtgaaaggactttgggattcttgggaagaagatgcatttactcgcgataaagccacaggccaatattttgatcctgctaaattacacacgctggatcaccacggtgattttttccaggtggctggcccgctgaatattggccgcacgccacaaggtcgccccattatatttcaggctggcgcatcggatgacggaaaaaaattagcggcgcgccatgctgatgctattttcacccaccatgaaactatggaagcggcacaggagttttatcgtgacgtaaaaagccagcttgaacgctttggccgcagcccggaggaactgcatattttccagggtgtcagcctgattgtcggaaaaaatgccgaggatgttgaacgccagtatcaggtgaccgcagccctggtttccatcaaagacgcgctcaactaccttggccgttattttgagcaccacgatttcagccaataccctctggatgcgcccttccccgatgtgggtaagctcgggcaaaacagctttcgcagcaccaccgatgaaatcaagcgtaatgcccacgaacgtggcctgacgttgcgccaggtagcgctggaagccgcaactccccgcccacgctttcacggtacggcgcaacaggttgccgatggcctgcaacactggttcgaaacctttgcaacagacggttttattatccagggcggtacgccagataccttcccgcgttttgtcgatgaagtggtgcccgtactgcaagcgcgcggccttttccgtacggaatacccgggcacgacattgcgtgaaaatttgggtctgacttcgccggccaaccagttcgcaccgcaataaaccaataacgataaaagagacaacgctatgcagaaaaccctattactcctggcgctggcgcttagccctgccgcctgggcacagagtgtgacgattaacggcgcgggcgtcagcctggaggcgaacaaggcgccgatcaataccaagatcaatccgcaggcggtggcccaattgccgcagggttatcactttgccgtccctggtaaattcaccgtcgcggtgtcagcgctcaattcaccgccgctgaccgtgtttgccgaagataacaaaacgctattgggcagcgaggtcgatatcgcccgcctggtagcggatagcctggggctggaacttaacgtcgttccgacttcctgggaggattggccacttggcgtttattccggcaaatatgatgccgctatcagcaatattaccgttaccagggagcgcaaagagaggttcgacttcgccacttaccgtaaagactccctcgggttctacgttaagtccgatagcccgatcaagtccattgagaaggcagaagacattgccgggctgcgcattatcgtcggttctggcaccaaccaggaagccatccttctggcctggaatcaggcaaatcagcagaaagggttgaagccttttaccccaatttataccaaagatgacgcagcccaaacgctggcactgcagtctgggcgcgccgacgccttctttggcccgaacgtgactggagcctggaaggcggcactcactggcaaaacccgtctggccgggagcgtggacggtggctggccaaaagcggcacatatcgcagtaacgctgaaaaaaggcagcggcctggtagcacccgtacaaaccgcgctgaatggcgttatcaacaatggggattatgaaaaagtgcttaaccgctggggagaaggcattgagcgcctttcggcctccgagatcaacccggcaggattaggcgattaaggaggccacatgagtgacatatttcgtgatgtttcgcctgaagccaaagagttgcaaccgattatcaacgggttattcggcgaatatgccgcccgctatggcgactatttctcccgcgatgccgaagtggaactggtgcaatggtatctgccgccgcaggggttgtttctggtgctggagcgtgatggcgaaatcattacgaccggtgcttacaaaccttttgacccgcataccgcagagctgaaacgtatctggacacatccgtcactgcgccaacagggcctggcgggccgtgtggtacgggaactggaacgtcgtgccttgctggcgggttatagccgcgtctatctcaccaccggatttcgccagccggaagccgtgcagctttatctggggcaaggatacgaaccgcagttcgacgttcaccgcgaccatgaagagtacagcgtaccgccctatgacggccgcctgcgttttatcaaaacgctgaccttcgccagtcaaagcaatattgcctgaggagcccaccgatgaattcatcttccagcattaaagtggttccggcgcgttatccgctacgcaccgctggggccatcgtggcgctgtttgtattggcgatcgtcgtccagtcgatcgccttcaatcctcgctgggaatgggcggtttttgcccgctggttctttgatccggtgatcctctcgggggtagcgcagaccttgctgctgacgctgctaggcaccgtactcagcctgatcatcggtggtgcgctcgcgctgtcgaggctatcgtcttcatggctgttaaacagcctggcatgggcctatatctggctgttccgttcgctaccgctgatcgtggtgctgattattctgtacaacttttcctacctgtacgagcggctttccatcggcattccctttaccgatattgctttcggcagctttgccaccatcaacgtgctcggccagttttccaccgcagtggtggggttaacgctggtacaaagtgcctatacggcagagatcattcgcggtggttttctgggtgtcgatcacggtcaatatgaggccgcagctgcgctaggcttacccgcctggcggcgtaccctgcgtattattctacctcaggcgctgcgtaccattctgcctgccggtttcaacgaaattatcagcctcgccaaagggaccgcgatggtttacgtcttagccatgcctgagctgttttataccatccagatgatttacaaccgcactcaggaagtgatccccctattgatggtgggtgccgtctggtatctggcgatcaccagcgtgttatcgctgttgcaacacgtcgtcgagcgctggttggcacgcagcgaacgccgctccgccgttaatcaggaagcgggcaaacagaacccatcgcatcagactgccccagctgcaccggaggtgatccatgtccccatcgcataacacccaaggccacatctccattaccggcgtcagcaaggtttttggccgtcataaggcgctggataacgtttctctggaaattccacccgggtcggtaacggtgatcctcgggccgtccggctcaggaaagtcgacgctgttacgcaccattaaccatctggagcgcgttgatgaaggctttattcagattgatggcgactacatcggctaccgtctgtcgggcgataagctttacgaactgaaggagaaagagatcctgcgtcagcgcatcaacgtagggtatgtgtttcagaacttcaatctgttcccgcacctcaccgtgttggaaaacctgattgaagccccaatcgcccatggtcatctgaaccgccaggacgccattaagcaagcgcttgaactgttagatgtggtgggcctgcgcgataaagccgattcctggccgcgtcatctgtctggcggccagcagcaacgcattgcgattgcacgtgcactggcactgcgcccgcgcgtcatgctgtttgacgaacccacctctgcactggacccggaactggtgggggaagtgcttgacgttatcaagaagcttgcccgctccggtgccacgctggtggtggtaacgcacgagattggttttgcccgggaggtagccgatcaggtggtgtttatggttgatggcaagatcgttgaacaaggccacagcgaggcggtgctcaaacgcccgcagcaccctcgcacccgtcaattcttatctaaagtcctttaagggaaaaaatgaaatatacacttctggcgctgctctggttcagttccgtcgccttggcacaagggaatatcgatctggctgccaatgaacaaccgctccgcacaactaaaaatccgcaggccatcagtaagatcccagcagattaccgcttcgtagagccagggacgctgacggtagccatctccgcgctcaattcaccaccgctagcgctgttggccagcgacaataaaacgcgcatcggtagcgatccggacatcgcgcggctgctcgccgacagcctggggctaaagctgaagctggtgccaaccgcctgggaagactggccactggggatcacttctggccgctatgacgttgcgctagtcaacattgccgtcacggaacagcgcaagaccaaatttgattttgccacttatcgcgctgactcactggcgttctcggtcaaatcgaccagcgatattcaatctatcagtaagcccgaggatgtggcggggctgcgggtaattgtcggctccggtaccaaccaggagagaattctgctgggttgggatgagcagaatcaacgtgagggcctgaaacccgcacagccgatttatctgaccgatgacgcctccggcaatctttatattcagtctggacgggcagatgtcatgttcggcccgcagtcggtagccgcctacaaagccgcgctgacaggccaaacccgcgtggtcggtctggggccaaagaaagcctatgtggccaccaccaccaaaaagggcaacgggctggttcatgccctacaggctgcgctagacggtacgatagcgcaaggtgagtatcaacaggtgctggctcgctggggtgagcaaggggaaggcgttgcagtatccgaagtaaatccacccgggatctcatactaagccaagtgggcgctgcatgcggcgccccctacgctggaacatgttcgtcccctaaaagtcaacattgccactttgtccgtcaccctccccctacacagcccacacttgacttattttgtctaatttgtattttaaggacatgcacacttttttgattatcgtccccgaagggggcatgctattcgagcctacgggcattgccgatatcctgatgcaagccaaccgcttgaggccgacggataccgcgcatccaccgtatcgggtgtcgattgccacgacccaggcgcaccgcgtgatccatgggggctcagggctgaatctactggcagatcaccgtctcactgatcttgaccctacgctaccgcatgacaccattatgatcaccggcagaggtatgagcgttgaggaaagcgatatcgtcgtcaattggctgcgtcaggctgcgccgtatgcacggcggatcgtatcgatttgcggcggtgcgtggctattggctcaggccggtttgcttgatggccgccgagccaccacacactggcggctacttgaagcgatgcaagctcaattccccaatgtccacgttgagaaaggcccgatttatcttcaggacggcaatatctggacctccgctggcgtcagttcaggcttcgacctcaccctggctttagtggaagacgatcacagcttcacgttagcgcgcgatgtcgcccaagacttggtgatgttcttgcgtcgccccggaggacaatctcagttcagccgttttctgctcagccaagccagctcgcctggcccaatccgggacctgcaaacgtggatactgcaaaatctgtccgacgatttatccgttgaaaggctggcggaacacgttgccatgagcccaaggaattttacccgcgttttcacccgtgaaaccgggatcagccccgccaagtatgtagaagaagtccgcctcgacgtagcacggcaacacctggaacaaagctcggataagctcgaacaaatcgccaccgccacgggttttggcaacagcctcaacctgcgtcgcgtgtttgaaagaaatctacaactcacgccgtcagattatcgagagcgttttcacgctcgcaacatgtcctaaattgattgttatttgtcatttacgccaaatcacccacgcactattttggaaccagataactcacctaggaggacatcatggtcaaagtaggcattaatggatttggtcgaattggcagaaacgtactgcgcgccgcgctgggtcgcaatgactttcaggtggtggcaatcaatgacctgaccgacagcaaaaccctggctcatcttctgaaatacgactcgctgcaaggtacattggccgccagtgtagaagcctctgaagggcagttactggtggatggccaaaccatccacgtcttctccgagcgcgatccaggcgctattgcgtggagcagcgtgggggttgatgtagtcatcgaagccaccggattcttcaccgacaaagccaaagctgaagtacacatcaccaagggtggcgcaaaacgggtgattttatctgcgcccggtaaagacgatgacatcacggtcgtgatgggtgtcaaccatgagaaatacgatcccgccttgcataaagtggttagcaacggcagctgtacaactaacggtttggcaccggcagcacaggtcctgcaccaaagcttcggtattgaacatggtttgatgaacaccacccatgcctataccaacagccaggccttgcacgatcaacctgaaaaagatctgcgcggagcccgtgccgccgcactgtctatcgtgccttattctagtggcgcggcgaaagcgctcggtaaagtgatcccggaattggacggacgcctgaccggctattcactgcgcgtgccagtgcccgtggtgtcgattgttgatctgaccgtcacgctcaaacgtgatgtgacggtagaagaagtgaacgcggcatttcgcaaagcggcaacctcaggacccttgcaagatatcttgggctacagcgatgagcctttggtatcgagcgactatcagggtgacccacggtcatcaattatcgacgggctgtctacgttggtcattggcggcaatctggtgaagatcctcgcctggtatgacaacgaatgggctttctctaaccgtctggttgacctggctgttttgatggatcaacgcggtttgtaatttctctaagcgggcgctctatgcagcgccccttctcgcccccccctcctctccatccgctccacaaaccagccaatgaattttagcgaggnnnnnnnnngccccacaacccagccaatgaattttagcgaggaccagacagaaaagcgccagccatcggctagactttaacttgtcagtgtaatactgctggtacgatacctataaagagaaaaattacttcataaacagaatactatgggtcattactcatcaaaggagcacgctatgcggatgtttcttgcagtggtctggacagggttgttattgctaaccatgccaactcatgcagcagaaccggaacccagtaccgggagggtctcgggttggtggaattctttaaccagcggagtcgcacaaacctgggaggatccgcaataccacgatttgtatctcccctttatcagttggcacgcccgctttatgtacgacaaggaaaaaacggataactacaatgagatgccgtggggcggtggctttgggatctcccgctataacgaagagggagactggagcgccctgtatgccatgatgtttaaagactcccataatgaatggcagccgattgccggctatggctgggaaaagggctggtatctggatcagaatcaagatttccgccttgggcttggagtgacggcggggatcaccgcacgccgggatttcggtaactacattccattgcctatcgtgctgccactgttctccgctggctataagcaggcaaccgttcagttcacctatatccccggaacctacaacaacggcaacgtgctgtttgcctggttacgctttagtttttaataaccggggatttatggcgggtagaaaaaggcccatttactcatttaaatgggctttctttcgagcaacttacaacacactgaccgttccggtcttaccatccagccgaacacgcatgccgttttccaaacgggtcatcacgcccttgacgctcattacggcgggcaattgcagctcacgtgccgttactgctccgtgagatagcggcccgccgctttcggtaatgacgccactggcacgataaaacagcgtcgtccaggccgggttggtggtgcgtgccaccaggatcgctcctttggggaatagggcaaaatcttccgggctgtggatcaggaacacgtcgccctcaatggtgccggggctacccgccaagcctttcaactcgttgccggtcgggatgtcttccggattggcctgctcgccgaaattccacgctgggctttgccgcttagcctgttgccagcccaccttgttatctcgcaccgcctgtgccagtggttcaaaccgatcctgcctcaccgcttcatcaatcacgttgaacggtgcgaagtagatgtcgctggcctcgctcaataccccacgcgccaccagtctttcccccacctctttgatccctttgcggaacggcaacgtcaggcgcgtggtctggtaatgctccagatcgtccaggtaggtataaactcgggccagacggatcacttcttcaataaaataacgcatcccttccggggcctggctcaaaaactggtgctgtgccgccgaggccgccaacttggcattcaacgcctgtccagccaaatcttcatcggccagctccaccagcatattcaactgatcgagcacgatatgcggtgcctccagccaggttggatagtaggcatcaaagtccagctcacggtgaccatggcgctgcaggaactgcgtcagctgtgcctcaaataccgggtaggcgtgcagttgattgaccaactctcttgaaggcaactgttcaaacgcctgctgcaaggccacgtcattgcgtatctgccgggaaagctcccaaagctccgcattcacctgcccggttttggtatcggaaaccgacagcagcaggtcaaacatcgctttggcctccgttggcgccagcgacatgttcaggatctggtagagcacggcatacaatgtgcgctgagttagtgaaatggcaatattaggcaggaagtagcgtttaccagcatcgcgcacgttcagtacgtattgccaacactcatccagtttgcgggcagaaaggtcttcacgtagcagtgcaccgatctctaacaggtaggtatccagatcgcgcatccagaaaacaggtaactcctgaacccaagagtagcgcctggccagctcaggaagtgccacctgcagttgttcgatagagctgatgccccccggcatgccgcccgcatagagctctaccgcattttgattgccataaatatagaaattcttgatagcaaaccacttaccaccaaagtgcggcaggcccatcaactcaaaggaaaagttcagcgattcatggaaaccctcttcggccagatcccaggtcagcggggtcaccgcattggggaagcgctctgcggactcatcacgcgtccagcgttcaggtacataggtcactggccgtgattgcagcagatagcagtctccggcagaaaacgcccactcgatgtcctgtggaaaaccaaagaatgtctgcgcctgccgggccatttttgccaccatctggcactgggcatcggtcagcgagggttgccccatctgctcggcagagagtgccagatgcttaaccccttgagtatccttgaggataatctcgcgtttctgcccgatattgcgctccaccacagtaaagtctggtagcgctacgcggaactcatcgatttcctgctctcccccgaccaccgattcgcccagcccaaagcaggcattaatcagcacccggttcagatcgccctgcacaggatcgatcgagaaagcgacccccgcactgtctgctgccgtcatctccaccatcttctgtaccaccaccgccattgaggcatccaggtgggcaagacccaggcgagagcgataaagcatcgcatgctcatgccacaaggaggcgtaacaatcccgtagcgctgtgagggtttctgccattccatgtatattgaggaaagtatcgtgctgcccggcaaaggcggcgcctggcaaatcctcaaaggtggaagacgagcgtacggcaactgcccagtgctcctcccccattgcctgcaaccgttcgacaatcggctgcgacagcgcctcatcaataggttgtgcgcgaatcagttgctgaatactctgactctgcgcggcgacattgtcactctgctgcaaaatagcggcgatctgtgattttagaggggcgagaaactggcggtatgccccgctggtaacgataaaccctggggggaccggtaaaccaccagcggtaaggcgtgccagactggcacctttccccccgctcagttgcagctcggtggcacggacatcggaaaagaccaacgtaaaatctgttgctacgtgcatgtgctatatccttagcgtggcatcgtgacgaaaataaccgcagttgcgcaaccacgccagcaccgagctggcgagtaatgtccccgccatcagatcgatgccatagtggtagcgcagatagagcgttgccaagaccagtccggcaacaacggggaagatcagcaaggctatccagcagtgccgctgcaatagcagatagccgagaatatacaggctgataccgcagtgcaggctggggaacacatccatcccggtccctccctgtgcaaccaggcccaccagaaaaccagtgatcgcgcccccaagcggcggataggtaaagagttcggggaatcgcaggtaagggccagcggcagggatcaggccatagccgataaaaccaaacagatacatcagcatcaaaccatagaagaagccacggctggcctgcgttttacgcttaacggcataaacgatcactggcaccagtatcagcaggtaaaaggcgagataacacaggctcaggatttccgaaagccagtaattttcgagcacgcggactcgctcagtcgcgccaacgcctgcaaacagtgcgcggtctaacgccagtaactcggtatcaaaggatctctgtgtcaccaggtggatcgccttgaatagcggaaaaaccagccaactgcaggcaaactggatcaccccaagccaacttttccaacgttccgaacgggcataggtggctttgaacagcaaacacagggcaaacaggccaaacgcaccggggataataaactggcggtcccccaggcggatggcgctaactatcccggccatcaagatcagagcaatcaccccaaggtagcagcgatagctgaacctcacgccatgcttggctgcccctggataaggttcgatacgactattcaagctttgcctcctgcaaatttaccccgccgcagccatcctaacgcggccgcaccataaagcagcaacaaccaaggataaaacatcacggctatcaacaaacaggggagccaaaccagcgccatggcgaaaccaccagcaaggcggaaaaaggtggtggtattgcggccatcggcgcggcgccctgtcaaccagccagcaagccacaccggtaacagagtgaggatgaacagccgccataacagctgatcccataaagaatgagttacctgcggggcagcgacaacaggctcacttaacgtctgctgctctgcctgcttaaacgcccgtgcgaaagaatccccatcacggagagaattccaggcctgcgcttccacctgagccagcatatgttcatcacggcagttaacagagacgctgtccaacgcctggctcaggcactgttgaatactctgctcccactctactgcgctgacatcgccctgctcaggcagaaccagaggttcacccaccatcagttcgacgccagagccaacgcgatccggagcccgatagaagcaaccggcaaccactacctgaaaacgacatttatcctgcatcagccgccggataattttcgccgctccaggataatagggttgcggccctggcccccattcgctggtaccttcggggaagacgatcacactgccgccctgcttaagatgagcgatagcatgcacaatagggttccccgcctgagcgcggctataaccataacgctggcgatccttatcacgaacgactgggatccccgcgaacattaaccgcagaaagcgcgagcgcagcagttgaaccgaggtgagaaactgcgcgacgggcaaaagttggttaaatacccaaccgtccgtcgctccgttgcgatggctggctagcagcagcgttggtatcttgccgtccaacggatcgatacgttgcccgttcggcgtcatgaatttcagggaagaatagtagaagtgcactagcaagcgggcaacacagcggtgccaaagcgagagtggctgccccggcggaaaacgtaaatagccaggtgtctggctggaagctccctgctccatatccctatgtctccctaggtcaaacgcaccgcgcccatcaaccagacgccatgcctacttctgagtccgccctctgcagactcagcgcttcatcatagctggacacaatcagctttaacaacagaaacctcatggaaataaacgctatcctggcacccaatctgctccatttattatccaagcaggcgcagcattcagcgcccctacgtcacaagccgattacggttttgtcagcaataaagatccctgagccttatagcgacttcacacaagtgcagttgcagatagattcattcggccaacgctttacgctatgctggggtatcgcaagaaccgaggaaaaacaatgaatacccctaacaatacgtcgctgactgccctgcaagccctcgaccaactcgaagttctgtatgacgcatcggtcaacgccttgcgcgctgccatcaaacaatttatcgcggatggtaccctaccagaggcgcaggcccgtgcctcggggctgttttcctacccggaactacgtgtacgctgggatggtgaacaccccgatcatccaagaactcgcgcctatggccgttttacccggcctggcagctacaccaccaccatcacccggccgcagctgttccgcccttatcttgccgaacagctagcaatgctgaccagtgaatatgccgccgtgatcgaagtcgttccctctcaacaagagatccccttcccttatgtgattgacggctccgatctggccttggacagaaccatgagtgccgggcttaccaagcatttccccaccaccgaactggcgcagattggcgatgaaaatgcagacggcctgtctccttttgccaaccattttccactctcccatttcgacgcactgcggaccgatttctcactggcccgcctgcggcattacaccggcacgccagtggaacattttcagcactttgtgttgtttaccaactacacacgctatgttgatgagtttgtccgctgggcgtgtagccagatcgccgatccggccagcccctatatcgcactgtcttgcgctggcgggaactttgtgacggcagaaacgccaaatccagagcagacagtgtccgatctggcctggaagaaccaccagatgcccgcctatcacctgatcgccaacgatggccaggggatcacgctggtcaatatcggtgttggcccttccaatgccaaaaccatctgcgatcacctggcagtgctgcggccccatgcctggctgatgattggccactgcggcggcctgcgagaaagccagtcgattggcgattacgtgttggcccacgcctacctgcgtgacgatcatgtcttagattcagttctgccaccggatatcccaatcccaagcatcgcggaagttcagcgcgcgctgtatgacgccaccaaaacggtaagcggtatgccgggagaagcggtaaaacagcggttacgcaccggtacggtggtcaccaccgacgatcgcaactgggagctgcgctattcggcttccgcgctgcgctttaacctcagccgcgccgtcgccgtcgatatggaaagcgccaccatcgcggcacagggttatcgcttccgggtgccttatggcacgttgctgtgcgtatctgataaaccgctacacggagagatcaaactgccaggccaggccaaccgtttttacgaaggtgcgatttctgaacacttgcagatcgggatttgtgccatcgacctgctgcgggctgaaggtgaacatctgcactcacgcaaactgcgcaccttcaacgagcctccgttccgctgatacaaaggactggcgccgcatgcggcgcccctacagcgccaaagccagcactcgcgtcggctgatgatggctggcggtaatttccagcaggatttccctcaccgctcccgccgccgcagtgagcggcttttggccgcaaaccaccaacgccagcggtaccgaaagcgctggcgcattgagacggatcatccaggccttggctgggccgatcgtcgctctggcaagcgactctggcaggatcgtcgcccccattccactagcgatagcggcgcaaagcatactgtgggattcgatctcaccaatgacattcgccgtgagttgacgcagcgccagagcctcatcaaccaggtcgcgcaccacgtcgccctcacgtggcaagaacagattaaaccggctcaccgccgataaatcgatgctgttgcccggatgagggatgcttctcgctgcgaccagatacaaatcttcttttgccaacgcagtgacgctaaggttcggcggcatgttctgcccgtacataaccgccatatccagagcctgcgtcgccacctgctggctcaacgcgttaccaatattttcatgcaggctcagcaaaatcccagggtgccgatcacgtaccgcctgcaacagcggcagcgccaactgcggggccgcactgccttgtaccaggccgaccgccacctgaccaaccagcgtttccccactgctgatcaccgcttgctgggcctgctcgcactgctgaagaatggtttgcgcatgcgcataaagaatattgccggcctccgtgggcatcactcctcgtttggttcggatcagcaattgctgtttcagttccccttccagagtggcaacttgctggctcagcgcaggctgcgcaatatgtaacacctccgccgcctgagtcaggctgccgatatcgacgatctttacgaaatacttcaagcgtctgaaattcatcgtggctcctacctgcggttaactgcgttcaatatcaactactgcaactacagcaaaaaacgggccaggcagaacaagcggtgtgttatcagtctaattgattaaaaaataatgaaagttaacgataagatgggaatggatgaagaggtaaaaccgggttctgcaccacactggggcattgccagtccccagcatggttcagatagaaaaaaacccgccaatcatctggcgggtttgttatagggttatggagctttttgctcggaggccggtattacatccaggatgcgtacgttatagaccatggtcgcgcccggtggaatatccggtgccatgcctttctcgccataggccagttcaggtggcaccaccagcgtcatgttaccgtggttcttcaacttgcctagcgcttcacggaacagcggtggataggcgctcagcggctgcgaaattgacgtcccggccagatccatatccttgatcactttaccgtcggtcaagctctctttaaccaccacggcgacggtatccccctcaccaatcacgctatcgccaacatagtcgatgcggtaatagaagccttgcttagactgaacaacgcgtggctgcttcttgaacttatcgatatagctgctgccttgcttttcgttctgctgtttgatctttttatgctgatcgttcagctccaactcactttcatacaaggctttggcaatctgttctttggccagtttggtctggccattgatcacatcggttacccctgccagtgccagttggcggttcacgtctacaccctgcgtctttttgctgttgagcaaatccaggatgtcattacccaacgcggtaccgatcgcataatcgcgtttttccacctgcgttttaggctccgtgaccacggacgtgccagccgtttgctttttctcggctgcagtcagcttttgctgcagttgggcgagatcctgcgccttctgctcattatctttggtttgtgccgccaactgctcttgcagcttggcactctcctg

SEQ ID NO: 304 - DNA, 91817 bp, unknown
  Altogen  635822 strain
  misc_feature (34312)..(34422): n is a, c, g, or t
  misc_feature (34450)..(34500): n is a, c, g, or t
  misc_feature (44864)..(44864): n is a, c, g, or t
gctatgccggaggatatttattagctagccacccgccgttaagccaggttttctgccacgaacgcccagttcaccaacgcccagaagttttccaggtactttggccgcgcattgcggtagtcgatatagtaagcatgttcccacacgtcaacggtcaatagcggaatgtctgcgcccgtcagcggggttgccgcgttcgaggtgctgacgattgccagactgccgtccgcttttttcaccagccaggtccagccagcgccgaagtttttcacggcggcatcggtgaactgctctttgaaggcggcgaaagagccgaatgacttattgatggcctccgccactgcgcctgttggttcgccaccaccttgcggtgacaagcagtgccaatagaaggtgtggttccagacttgagcggcgttgttgaacaccccaccggtggaggtcttgacgatctcgaccagggatttgccttcgaactcgctgcctttcaccaggttgttcaggttaaccacgtaggtgttatggtgcttgccatagtggtattccagcgtttctgcggaaatgtgcggttcgagagcgtttttctcatatggtaatgcaggtaattcaaacgacattgctttctccttttatagacaatacgtctctccgacactgtgggccttggtggccgagggcgaaaaaacgcgattgcaccacttttgttatggttattaatcttaacaactttccgagcgaaaagaacatccaaagtgtgccaagtgactgattgattgaagtcgcagcggctttttgtttttttgggagaggagtgcgcggctgagcattaggctcagccgtgccaagtcaacgaatggtggttggggtcactacgcggcgggcgccaatataatggttctgccaatagtcattatccaactgactgatacgaatttcttcaccggtacgcggtgactggatgaacttgccgttaccaagatagacaccaacgtgatcggctgtgccacggttattgatacggaagaacaccagatcgcccatctcaagctcattgcgcttgatcggcgcagcatctcggaggtggtacatttcgttggcggtacgcggcattttgattttgacaacgtctttgtacgcgtaataaatcagcccactacagtcgaagcccgtaccgggtgaagatccaccccaacggtagggtttacccatttgccccatcagcttggccattgcggtctgcttggcgtgctgatagcgttttttgtgggcggcagaaagtttcagaggcttttcgtggccagccaattttgctgtggccttgccttcctcacgatggcgaccataaccttttttatagcctttcttaggcggggtgactttgaccttggccgttttggttacctggtttttggttttaacgctggtggttttttttgcgttctttaaggttgcttgtttgttttttagcgttttcggaggggtggctgccttcacttttttattggctttctccgctttcttttttttgcggtcgtctggccgggcttcattaacgtgactcttgcgctgctcggcagaaacacgtgcctgtggcgcagcgtgcgccaaattgaagaagagctgcgtaaatagcagcacaaaaagtgtaataattaaccgcatatcgacgttaccaaccttggctccgaaacagaaatcgaatgagtcacagtattcccgaaattcaccctataaaacagcgtggatctcataaatactaattcatattgtgagaaaacgttaatggcatttttattgttgcaaaatcaagcgtctagtggctaaaaaagcgacatggatcatgcggttggcttattgctcgcggcattgggctgcacaaatataatagtgaaacgtccgggttaaaaatgttattctggggccatgttttaaccagctcggtgtgaccgcagcgtttgctgaggcaatcagagaatgtccctgcaaaagatggcgttttcttggcaccggtcctgccgctacaatagacaatgtgatgcatgttgtagccatgatgtggcttgaggaagcaataatgacgacgattgaaaaaattcagcagcaaatttctgctaacccgatcctgctgtatatgaagggctcaccgaaattgccaagctgcggtttctctgctcaggccgtgcaggcgctttctgcctgtggcgaacgctttgcctatgttgatattctgcaaaacccggatattcgcgccgagctgccaaaatacgccaactggccaaccttcccacagctgtgggtcgatggtgaactggttggcggctgcgatatcatcatcgagatgtaccagcgtggtgaactgcagccgttgatcaaagaaacggccgagaaatataaagatcaggaagaccaacagccttaatggcctaggggtttaccagataaaatcgggcggcacctttaacagtgccgcccgatttttttatgtctgtcagtttgccagcaagctattgcgattcaacgttggcaatcggccagccaccgagacgtttccagcgattgaccagttcacagaatagctgggcggtttgctgagtatcataaagtgctgagtgcgcctggctgctatcaaacggcatgccggcggcaatacaggctttagccagcaccgtctgccccaataccagcccgctaagcgctgcggtatcaaaggtggcgaacgggtggaacgggttgcgcttcaggctggcacgctcggcggcggccatcaggaaactgtgatcaaagttggcattatgcgccacgatgattgcccggttacagccctgatccttaatgcctttacgcacggctttgaaaatcgcatgcagcgcatcatattcactcactgcgccacgcagtggattatgtggatcgataccgttgaaggccagcgcttccggttgcaggtttgccccttcaaacggctctacatgaaaatgcagcgtttcatcttgctgtaaccagccattttcatccattttcagcgtgacggcggcaatctctagcagcgcatcggtctgagcatgaaacccggcggtttccacatcaataacaacgggataaaacccacggaaacggccactcagggcgttaagatcacttttttcggccatcagtttcttatctttagcgaattcagcgcgcattatgacaaatttcttgtcttggtgcagcggagatagaaagcagggcgcatggagcgccctggagaaacctcagttaccgaggccgtgacctgcgtgcttgttctcgatcagttcgatcttgtagccgtccggatcttcgacgaaggcaatcacggtggtaccgcccttgactgggccggcttcgcgggtgactttgccaccggcctgacggatgttgtcgcaggtagcggctacatcatcgacgcccagcgccagatgaccaaaagcggagcccatctcgtagctgtcgacgccccagttataggtcagttcgatgaccgagccttcgctttcatcgctataacccacgaaggccagcgagtatttgtactcggtgttttcgctggtacgcagtaagcgcatgcctaataccttggtatagaagtcgatggagcgttgcagatcgccgacacggagcatggtatggagtaagcgcataatttcctctgattggatatgccgcggctgacggcaggtgacttgaacagcgtcagacagtatagccttgtcgcataaggcaattcaacgcatgtggtaggtgatggtataggtgacgttgtcacaaataaatatggctgcggataatagtacggcaggcgggggccagacagaacgccgacacgccgtggatccatccatggaggctcgtatcgcgcgtccatgcgctcaacggtcggctaacctgtatggctcccacccacctcaacctgaggtgtcgcggtatttagcgcacctaattagctgagtgcaaagtcaatttaattcacttacagggtcgggtagtcggtataaccctcggcaccaccgccgtagaagaaatcggcacgctgctcgttgagcggagcctgttgtttaaagcgctccaccagatctgggttggcgatatagctgcggccaaaggcgacggcatcaataaagccttgggcgatcagctcttccgctttctccgccgtataggcacccgcgccaataatcacgccttggaagtgtgctcttactgcatcgcggaacgcggttgagtaaggcttgccaccggcccaatccggctcggaaatatgcaggtaggcgataccgcgcttgttcaactcttcgatcagatacaacgccgcgtcttcctgatcttcgccgttgtccaagccattgaacgggcctaacggcgagatacggataccaacgcgatcggcaccgatttcggcaatgctggcatcgaccacttccagcgtcagacgggtacggttttcaatgctgccaccgtattggtcggtacgctggttggatgccggagacataaactggtgcagcaggtaaccatgtgcggcgtgcagttcaatatagtcaaaaccggcttcacgcgagttggccgctgcctgacggaaatcgctgacgatccccggaatttcgttggtttccaacgcgcgcggggtagaggttggcacacgaacccaggcaccggtttcatcacgtaccgtggtgcgggtttcggcattgatcgctgaaggcgcgacgggagcctgctggcccggctgcaagctggagtgtgagatacgccctacgtgccaaagctgcacagcgatatgaccctgtttgtcatgtactgcctgggtgatttttttccacgcggcgatttgttctggggtatgcagaccgggtgctccggcataacctttcgcctggaaagaaatctgggtggcttcggtgatcagcaggccagcgctggcacgctgcgcataatattccgccatcaatggcgttgggatgtcacctggctcgatgctgcgcagacgagtcagcggagccatgaacacacggttgggcagggtggtgtggccaactttgagcggagagaacaatttttcaatcttcatagtgcatcctatagtattagaccagtcgactagtgatggtgaacaatttcgctaacatgtttttcgggtaaaaaatgggggttatggttgcgctggacgcaacagtaattcgatactttccagcgcacaggtcagtggggcgaccgagtggcggattttagcccgcaacgatgcgcccaaccacagcgagtacagcgtttccgccgtggccgccgggctcatggtgatagacagtgaaccttcacggatgccgcgttcgatcgcgtcttgcagatgaccgatcacgcggctggtgcccgcttccaacgcatggcgcataggttcagaaagatcgctgacctctgcggagagtttcactgccaggcaagcattatggcactcactacggcagtggaagctgatggcctgggcgtaataacttaataactgattacgcgcatcgctacgggagtcggcaaacagcgcctgcatttgagcgtcataatgggcaaaatagcgttgcaacatcgcttcgccaaaagcttccttcgagcgaaaatagtgatagaacgatcctttgggcacgccagcggtagcgagcaactcactgaggcccatgccggtaaaaccaaggcgcaggctgagcgtttcgccggtagcgagcagatgttctcgggtatccccgttgcaattcgtctgttttgtcatattggaaatgagaataatagaccgattggtctaggtcaagtcgcagataaaaaaacggataaaaatttcggcccatacggcaaacattgcagcctgcttagccctctgtagcggacctgatcacgccatcacacctaaggggcgccgcatgctgcgcccgaaaagcgctcgtctagctgcatgcggtgtccgtttataactattgtgccagagggagcggctaaggttaagccttgcgacagcgctgcagaatatccaggtcaggctgatactgccgtgtctgcacgtttaccatgcccaacagggtgtggaacagattatcctgtgaaactttttcggtatccgccagagattgcagacattgacggttgatgccgaaattgcgttcataatcggccgacatccacatcaggaaaggcacctgggtctgctgagaaggcgcgaacatataaggcgtaccgtgcaggtacatgccattctccccgagcgattcaccgtgatcggaaagatagaccattgccgtattgaatttgctgctgtattgctgcaacagcttgatggtgctgtccagcatggcgtcggtgtacagtagcgaattgtcgtaggtattcaccagttgctcgtgggtacagtcctggatttggttgctgtcacaggtcggtgagaactgacgtaattctggcgtactgcggcgatagtaggccgggccgtggctccccatctgatgcagtacgatcacaccgtcccctttcaggccgttgatataatcgtccagtttgtgcagcagcacgctatccatgcagacatcgccatcgcaatactgtgaaagcttcagcctggtcatgtcgatatgtgggatgcgatcgcaggcccccttacaaccgccgtcattttcgcgccacagcaggttgactccggcatgtgccatcacgtccagcatgccttcctgatgagcggccaaggtggcatcgtaatcgctgcgtcgcatgttcgagaacatgcagggcacggagatagccgtttcggtaccacaggaactggcatttttgaaataaaccacatggtcctgcttcaagcggggattggtctcgcgtgcgtaaccacctagcgaaaaattctctgcccgcgcggtttcgccgaccaccaggatcaccagggtctttttggcctggctgctgatcaccgggcctaaatgggcatcttcaccaatcttgaccagcggcagattttggtggaaatagcggtgttgagcgtacttgatggtgccagccacaaaattgcttggggtgagcattttcaccacgcttttattgttgcggattagcgaggcgtaatctttgtagaataacgccgcaaccaacaggatcaccaccacggaaagcatcacgttggccgcgcgcaggccaatcatgtaccaccaagggcgggttttattgatgcgcaccaagcacacgaaaacggcaggcaagatgcccagcaatagcagccataaccccatacgaggggtgagcaacgccgttgcttcctgtgcgttggtctcgaaggcgttctgcatcatattgccgtcaatcaccacaccatagctgaacataaaatagttggccgccgcgctgccgagcagcaacagaataaccaggggtttacgcaggaacggaatggttaatacgctgaagataatattcagggcacagaaaataaccaccggcatagtcgccgcaaaaatgacgctatgtacgctatcaaaattgatatatgaccaggcctggtgaataaatagcaggttctggaaaactgtgaaaaatagggcgcaagccaggataaaacccaagctgttgcattgtaatgattgacgtaagcgcattgccaaatctggatcctgctattaggtaatgcgctgaaatttaccagaggaaacttaagataaccttagacgtagtgagcggctgcaacgattacagccgctggcgggtaattaataggccgcggtaaactgtgccttgatgaactgcggtttttcaacctcatcgataatggcaaccgcgaggtcttctaccgaaatattggccggagcttcacccttcatcagcaattgcgtcgtgcccaaacggaactggccggtacgcttgccgggttccagcaacgcggcaggggaaaggtaggtccaatccaactgggtttcttttttcaacgcattacgtaaatcccgtaccgcttgggcccctggacgaatattttccgggaactgcggggtatcaaccagctcaactcccggagccacttccaggctaccggcaccgccaacgtacagcaggcgtttaaccgcggattgttttaccgctgccaggatttgttgggcacctttagcggttttctcatacagatccgcctccgcccaaccagggttgtaggcgctgatcacgacatcatggccagctaactgttgtgccaaccacgggccatcggccacgtcacccagggcgacggtgagattggcattatccggcagatcttttttctgacgggcgatggcggttacttgcaggccgcgggccaaagcttcatccactacgcgacggccaacaaaaccggttgctccaataatggcgactttcatgaggtctctcctgtgaaatgttttttagcgggttgccgtaccactcagtggcggcgcagtagaaatactataagccttaacaatgcggctgattagtgccatatttatgctttcttgattaagtaaaacttcataatcatggataaactgaatcgaatggcggtattcgccaccgtggtggccgaggggtcctttgttgcggcggcccgtcgactagagatgacgccctctgcggtcagccagcatatgaggtcgttagaaaagtcgttgggcgtggcgttattgcatcgctccactcgccggctggcactaaccgatgcgggggaagccttctacccaggttgcgaagccatgttgcaggaagcacagcgcgcggagcagcggttggcggagctgcgggatacgctggtgggcgaactacgcattgccaccaccgtcgggatcggtagcggccccttggcggaggccttggctcccttgctgctggcacacccaaagctgacgctgcgtattctggccgatgaccaggtggtggatatgatcgagcagcgggtagatatctcgctgcgcgtaaatctgcaactggcagataccaacctgattgctcacccgctgaccgcctggcccatggtgctctgtgccgcgccgcgctatcttagccagcatggcgtaccagaaacgcctcaggagctggtgcaacaccgctggatcaccggcagtggtcacgggttacatctcgatttgcatcaccatacgggcgaaacattcaaactacgcctggcggcggggcaggttgtcagcggtagcatgaacgtgatccgggcctttacccgcaatggcttggggatttccggccaaccgctgtatgaaattggtgatgaactgcgccggggggaattaatcgccctgttaccgcagtggcggccagcgccatatcggctgcatgcgttgactctggagcgggttctgccggagaaaacgcgccaggcgctgcactatttgcgagaatattttcgccgtcatggggaaaagccacttgccaatggccccgatgacgtcttcaattagcatgacaacgcaggaggacgtgtggcgcagcaactcgagttctttgacatcccaagcccgtgccgtggtatttgccaggccgatgagcgcggctattgtcgtggttgcctgcgcagccgcgaggagcgctttggctggatgcaaatgaacgatgtccagaaaaaggacgttctgcgcctgtgtcgccagcgttacctgcgctcactgcgtaccggcaagcagccagaagagatcccgccagagcagccctcgctgttttaactttattgctcattttttcgatccgccgcacgttaaggccacttttgcgtttcctacggcttgggcgcttgtgtatgctggcgttaactattgtcatgaggtttaacaatgctgaatcgtattaagctggcaccacttgggcccgagttctcacgcatgatttgcggctactggcgtttgatggagtggggcatgtcaccgcagcagttgctgacgtttatcaagcaacacgttgagttgggggtgaccacggcggaccacgcggatatttatggtggttatgcctgcgagcaggcttttggcgaggctatcaagctacagccttcggtgcgtcaggggatggaactggtgtcgaagtgcggcatcgccaccaccgccaagccgggtaacccaattgggcattacatcaccgatcgcgagcatattgtgcacagcgcagagcagtcattatcgcacctgcatacggactacctggatttattgttgatccatcgtcccgatccgttgatggaagccgacgaggtagcagaggcctttgtggcgctgcataaaagcggtaaggtgcgccatttcggcgtttcgaactttacgccagcacagttttccttattgcaatcacgtctgccgttctctctggtgaccaaccagatcgaaatttccccgatctatcagccagcgatcctcgacggcaccttggaccaatgccagcaactgcgtatcaaaccgatggcctggtcttgtctgggaggcgggcggctattcagcgacgctgagttccagccgctacgtgatgaactgcaaacggtggcacaagaaattggtgccgaaaccattgagcaggtggtgtatgcctgggttatgcgtctgccttcggcaccgctgccaatcatcggctccggcaagatcgagcgcgtacgttcggccctgaaggcgcaagagctgaccttgagccgccagcagtggttccgcattcgtaaagcggcactgggttacgacgtaccataagttgagttggtaaggctggcattgtgccagcctttgccactacttcatctgcataacgccgaaggtttcgtttttatacgctaaggcgacaacttgcatcccttggcttggctgccatgaggaatctggcaaccgtttgttaaagaatgcattcagtattaaagggtgggtgaagacgaacactttgccctggctaaattcatatttttgaccgatagcggacaagaacttatccaaacgataggcggcgatttcgccattttcgccttcatctggagcaacaaagcggatcaggttattggccgagaacaggttcctcgccccaactcgctgctataagccgcgataaatcgggtggattgtagtgtgcggtgtaattgctgtaacgggaggaaggtcacaaaatattataaccagctcactggtggttctgattaatggctaattgcaactgtgacaaaatcaattcggtatatactccctaaggactataactatcgcatggagattgagtgatgaaacgttattggtgtgcggcattggggttgatggcctgcggcgttgcccaggcggcaacggttgatgtcgaaatgaatctggtgaccggccagggaattggtcaggacattggtaaaatcacaattagcgaaacgccttacggcctgttgttcaccccgcagttgaaagctttgcctgctggtgtgcacggttttcacgttcatgagaaaggcagctgtgagccgggtatgaaagaaggcaaggcggttgccgcattggctgcgggtggccactttgatcctgcaaaaaccggcaagcatctcgggccttatgatgccaacgggcatttaggcgatttgccagcaatctatgtcacggcggacggtatggccgacacccaggtcctggctccgcgcttgaagaaaatcagcgaaatcgaaggcaaggcgctgatggtacacgccgggggggataaccactccgatcaacccaaacctctgggtggtggtggcgatcgcttcgcctgtggcgtaatcaaataaatcagccgcccgcgtcagcctggcgtgggcgctgttaccgcttccggtggaatgatcgcctgctgtaactgctgcagtgagcagtacagtcgccaaatcaagcccgccaaatcacgcgcagcctgttctggatgctgggcaagcgcgttactcatacgctgcaactcctgcaaggtggcgtccaacgacgcatgctggacccctttctcagtcatgactcccttcaaacaatgaatacagacgtcgcgcacggcggccagcgggtctgaacgggtttgccaatcacgcagttgccaaaccacgtggctgcagttcagtagtactactccccagcgcaatagccaagtgcgagcctcctgatcccggctttgattcagttgactgatgcggtgataaatacgcgactcaaactgactttcgctttgctgcggtttcttactcaattgatcgataaaatcacggcgtaacgcgcggataatccgtcggcttttgagtttgtccgaactgggccgtaggatttggaacgccaatccggccaacagcacgccggcaatcttggcgagactgtcattgatatagccctgataatcgtagctcggtgggttggtcacggcgagaaacgatcccataaacacgatcaactgaccccatagtggggcgtagggtggattttgcagtttcaacatctgcatcgtgaccagggtcgggaacaggaaggcgcagaacacccagaaatcgtcaatctggatcatcaggccaaacttcatcacaaagcagaaggcaaacagcagggaaacagccttcagtaaggtggtgatggatttgatcggcgaaggcgtagaagaatagagcacgcaactgatggcgatcagcgtcagcgcagagctaccggagtcccactgggtagtgatccaataagcgcaaccgatcaggatgcataagaaagtgcgtagcccgttgtaagcggcctcaacactgtcggtatggcgcgctagtgaggtaactcgcggtggttcgatatcgctgacctgggtagcgctttccagccgttgcagccaacgggaacagcgcagatagagccagcaaaagtggcgcaggcgcaggaagaaggcccgatggcgataatcggccggatcctgaggggcgatggcgaccagaatatgagccagccggtatttatccgtggtggggtcgcgtaattcattcaacaattgctccaacactgccgccagattctccgggcaatctggccagtttaacaacatgcggcgcaggctggagatgacgctggtgatgcgcaattgctgatgcagcatgtagttgaggatattgttttgtcggcgcagccggtaatggctccagaaggcctgaattctcagcaggttcatggtcaggatctggccgataacgccctcatgggaggtacgcatccgcaggctgatttccggttgccacagcatggcggcgtgttccagcaggcgtaagtgcatgcggcgtagcgataccagcaaagtctcaccatcggaagtgcttggcaggatcatcatcatcaggccaccgcacaggataccggtgatcacctcacatacgcgtgcctgggtgatatcaaaaatttgctgggtgtcggtaatattaaccgtgccaaacacgatgatcgcggcggtatagcccgccagggcaaaggcgtaggagacattgttctggtagtggttggaaatgtaggtgcatagccccaaccaactggcaatcgacaaggtgaacaaccagggatcgttcaggcaaccggcaatcagcagtgaagccatggcaccaagcaggctgccaaaaatgcggccaatgctcttgctgatcacgccgccaaccgtcggaaaactgacgacggcggcggaggtcagtgcccaatagggctcgtccagctgtaaaacgaaggcgacccacaacgccaggcacatagccagggtgttgcgtagcgcatagcgccattgccctgcggtggctttaccccagggcgagcgcttccattcaagaaagggcaggttcacacattaatcctgctgatgaattgaaatggtgcaggtggtaccggctaccagagtcaggtcggctggaatatcgatcagcttgatgcgtaccggcacccgttgtgccaggcgtacccaaggcacgttgggtttcacatccatcagcaaatcactgctgctgtcggcgctttggtcgtaaatggcccggccaatgctttcgaccaccccttgcagccgaatattgccgttatacaacacgatatccgccttgcgtccctctctgatatgtctgagcttggtctcttcgaaataaccgagcacatagaacgaatgggtgtctaccagcgccaccaacggcgttcctgcggtggcgtagttgccgacgcgggcctgtaagttggtgatgtaaccgtcggtaggggcatagatccgcgttttgctgaggttccatttggcctgttccagattggcctgcgccgccttatacgaggctttcatggaggcggcggccaggttggactcatccagatcttccgaggagatgacgttacggggcaggctgcggcggcgggctgcttcatgatcggccttggccatatctgcctgcgctttggccagcgccgcctcggcattgtccaacgcaatttggtaaggcacgggatcaatgctgaaaatcaggcttcccgcagtaacgaactgattatcatgaacgagtatcttctctaatctgccagagacttccggggtaatattgacgagttcagctcgaaccttaccgtcgcgtgtccaaggggattgcatgtagtaattccataaccaccagccagcacagatcgcgatggcgaaaacaataaccgtcgaaaaatactttaatgtcttatgcttcatgagttaccaactcgctaggagccacagggaaccgctgacggtaatgacgaagatggacagatccatcagcattgggtgccaaatatcaccggagtacatccagtcgcgtagcaagtgatgcaccagcaaccagaagactaaacccagtaagaaagctttaaatagaggtgggaaataaagcgatgcacctagcaccagatcgggcagtggtgacgcagtatggagccaagtcgtattcacgttagcaatcccgatgagtgaatatgaaggatgtttgcatagaggataaccaattaccgataaaaatgtgtctatttttgcgatttggattatatacatttgtgtttttaatgttaattaaccaaaatgggctacactttggggagtaatgttagcatgctaactataaggagggggaagtggaatcaacgttaggttcagatttagcacgattagttcgtgtttggcgtgcgctgatcgatcatcggctaaagccgttggagcttacacaaacgcattgggtgacattgcacaatatcaaccgattaccgcctgaacagtcgcaaatccaattggcaaaagcgatcggtattgagcaaccttcattggtccgtaccttggatcaactggaagaaaaagggttgatcacccgtcacacctgcgctaacgatcgacgtgccaagcgcatcaaattgaccgaggcggcagagccgattattcgtgaagtggatagtgtgatcacgtcaaccagaggcgaaattctcagcggtatctcggcagaagaagtaagacttttagttggtctgattagcaagctggaacagaacatcatcgaactgcaagaaaaacaataaatccagcgccttttttattatgcttagtcacagcaacaaacagaaaccggaggcccaggggcctccggttttgcattcaggcaaggacgttacagtggagaaacggtaacggtactgccattttgcgccatacgaacgcgctggcctgggctgaatttagtcgacccggctttctgtaccaccacgatattttctttattatcggttttgatttccagctcccaggcgttgctacggctagctgcgctaccgacgctgtcgcctaccacaccaccggctacggcgcccgctgcggttgccaggctacggccagtgccgccaccaatggtattccccaggaatccacccaggactgcgccgccgatggtgccaagcatgcttgagccttcaccgccctgaatttgcaccgggcgtacggacaccaaggtcccaaaggtcacggtttgtacctgtttggcctgagaggcggaatagacatcaccggacgcggtttggtttgcacagcccgccagtgtgactgaggcgagagcgacaacaagaagacgcttgatcatataaagctcctgcagttggtaatccagatctgggagataggcccaaaccaagttctataaatattacagcaattatggttgaatcggtttgaaatcatccatgagctgcctctgtaatacagcttagctttcctctgttcaaccaataataaacggtggtttagctttatgacagaactgaaaacaaataatcggcgctttaaccccgcggattgttgaatatataaccaattctcgacataaaataaacaacttcgctcacaggccgtaaaaaagacatcataattcatggcgttaatcgcacaattctggtctatttaaagggtgaaaacggttgcaacctggaaagggtaaaggatagtgctgatgaagtcaggccgctatattggtgttatgtctggcaccagtctggatgggatcgacgtggtgcttgccgcgatcgatgaacgtatggtggcgcaacaggcaagctatagccacccaatgccgatccaactgaaaaaagatattttggggatgtgccaagggcagcagaccacgctttctgccgtaggacggttggatgcgcagttgggcacgctgttcggtgaagcggtgcaggggctgttaaagcagaccggtattccggcccatgaaatcaccgccattggctgtcatggccaaacggtatggcatgagccggagggcgagacacgtttttcgatgcagcttggggacaataaccgggtggcggcattgaccaatatcactaccgtgggggattttcgccgccgtgatatggcctatggtggccaaggggcgcctttggttcccgcgtttcatcaggctttgttggctcacccgaccgagcgccgtatggtgctgaatattggtggcatcgccaacctgtcactgttactgcccggcgcaccggtgcgcggttttgataccgggccggggaatatgctgctggatgcgtgggtatggcgccatcgctcgaaacctttcgataaagatggcctttgggcgatggaagggcgcgtttgcttaccgctattgcagcagatgttggccgacccttatttcgccttaccggcaccgaaaagtaccggccgagaatatttcaatatcagttggctggaaaaacagctggcgacgttgccggggttaacgccggtggatgtgatgagcacgctggtggaactgaccgccaccaccattagcgagcaggtgatgctggctgggggctgtgagcggctgctggtctgcggtggtggtgcccgtaatccactgttgatggcgagaatgtctgctttgctgccgggtaccgaggtggcaaccaccgatcactttggcgtcagtggagatgacatggaggcgttggcttttgcctggctagcattccggaccctttccggtctgccgggaaatctgccttcagttaccggtgccagttgtgaaacgctgctaggtgggatttatccggttttgccgttgggccgccgctagctctgttaggataaggaaagggtacatatcttaaggagcacctgatgaaaaaaatagcgatggttgccggagttctcgtgttggcgggttgcagctatgtggtcccacaaaaaagcgaaacgttgcactatcaatgtggaacgacgccgcttaccgtggaactcaatggtgaagagagcacggtcagcttcctgatggacggcgaacaactgaagctgaaacaggtgctggcggcgtccggtgccaaatacagcgacggtaaatacaccttctggtcgaaagggccaaacgcctttgtcgagcgcaatgataaagtgatcatgagcgactgcgtgctggctcaagacgctaaccacgcttaataccgcgccattgaagcctgaggcaggtgggagttgtgcaggttaaccgaccgtcgagcgcagagatgcgcgatacgaaccccccatgtatgggttgacggcgtgtcggtgttctgcacgactctcacttgttgcacgatcggggcgcagcaatttgctagcagaatgattgagatcctgctgctacaggcgcagaatatgacaacgaatttaccgcttggttgctaatccagatgactgataataatgagtttgatgtggcggatctgcgccgtgaatatacccgtggcgggctacgccgtaacgatctgaccgccaaccccctggatttgttcgaacgctggctcaaacaggcttgtgaggcgcgtctggccgatcctaccgccatgtgtgtcgctaccgtggacgagcaggggcagcctttccaacgcatcgtgctgctaaagcacttcgatgatctgggcctggtgttttataccaacctgggcagccgcaaagcgcaacagctggcgcaaaacccgcatatcagcctgctgttcccgtggcatatgctggatcgccaggtgatcttcctcggccaggccgagcggctatcgacgctggaagtgatgaagtatttcaacagtcggcccaaagacagccagatcggcgcttgggtgtcgcagcagtcaacgcgcatctccgctcgtggcatcctggaaagcaaattcctcgaactgaagcaaaaattccagcaaggcgaggtgccattgcccagtttttggggtggtttccgcgtgaaatttgactccgttgagttctggcaagggggcgcacaccggttgcacgaccgtttcctgtatcaacgcgagggaaatgactggaaaattgaccgactggcaccttgatagacggaaaatcccccttaagcgctggcactgatgccgctggcgctttattctatgcgctaccccgaattttgtgattttcgccaatgggcgaaggccgtgtaccggcaaaggtgcattcgtttatacatggagaaattgatggctagcatcaacctgattcaacaactgcaagagcggggcctggtggctcaagtgacggacgaggaagcgttagcagagcgactggcgcaagggccaattgcactgtattgcggcttcgatccgaccgctgacagcttgcatttgggccatctggtgcctctgctgtgcctgaagcgtttccaactggccggccatacgccggtagcgttggtaggtggcgcgaccggtatgatcggcgacccaagctttaaagccgccgaacgcaaactcaacaccacggaaacggtcaacgaatgggtcgagaaaatccgcaagcaggtttctccgttcctcgatttcgactgtggcagcaatagcgccattgcggccaacaactacgattggtttggcggcatgaacgtgctgaccttcctgcgtgacatcggtaaacacttctcggttaaccagatgatcaataaggaagcggtcaagcagcgcctgaaccgtgatgattccgggatctccttcaccgagttttcctacaacctgctgcaagggttcgacttctccgagctgtataaccgccatcaggtggagttgcagatcggtggctccgaccagtggggcaacatcacctcgggtatcgacctgactcgccgcatgcaccagaaacaggtgttcggcctgacggtgccgttgatcaccaagtcagacggtaccaagtttggtaaaaccgaaggtggcgcggtatggctggctccggaaaaaaccagcccgtacaaattctaccagttctggatcaacaccgcggatgcggacgtttatcgcttcctgaagttcttcaccttcctgagcattgaagagattaatgcgctggaagaagaagacaagaacagcggtaaagcgccgcgcgctcagtatgtgctggcagaagaagtgaccggtatggtgcatggtgctgagggtttggccgcggcgaaacgtatcacccagagcctgttctctggcgcactgcacgaaatgaccgaggcggactttgcgcagttggctcaggatggcatgccaaccatcaagctggagaacgatgcagatctgcaacaggcgctggtaaatgcagaactggtcccttctcgcgggcaggctcgcaccatgatcggttccaatgcggtgaccatcaatggtgagaagcaatccaacccggaatatctgtttaccgacagcgatcgcctgtttggccgttacacgctgctgcgtcgcggcaaaaagcattactgcctggttgactggaaataatctgttttgatactgacaaggggcccaatgtggcccctttcttttattcaggctttaaagaccttcggcactcaacgtagctgccaccgctgggcgagccgctacgcgatcgaaataagccgtcaggtgcgcgtgcttagtgagatcaaactgtaacgccttcgcccaacgcaacacggtgaacagatacgcatccgccacgctgaaacgctgtcccaacaggtaatgctgtttttccagcaccgagtctaggtagctgaactggctagccagcttatcgcgggcaatcgctttgtattcgtccggcgtcttcgggttaaacagcgggctgaagcctttgtgcaactcggtggccacatagttcagccattcgatcgcatgatagcgagaaagcgtgccagcggccgggatcaggttacgatccggtacgcgatctgccaggtattgcacaatcgccacgccttcggtcagcaggctgccatcgtcaagtaccaacgccgggacttgcccctttgggttgatcgccagatagtcggcaccactttcggttttcttgtgtgctaaatcgactttctctgcggtgaaatccagcccggcctcacgtaatacgatgtgaggggacagggaacaggcgccagctttatagaacaatttcatcgaaaactccttgatggtgatgaaggacaggcaggtttaacttcccatcctagtcctaggccggaaaaattacagcggttttgccaacaatattttattactccgccagagtgagtggttgcaactgcgccagtaaatcggcgatctgctgctgcaatgcctgtggcgcggtttgcattggggagcgaagctcgttttttatcagtcccaactgagatagcgccgctttaaccgggcccgggttcgggtagctgaacatctgttggatcattggcagcagggtatagaaattgctgcgtgcggcagccagatcgccttgcgcgacttgttccaccagagcaacaaagcgttccgggtgcaggtgtgccgcagcggaaattgcgccactgccacccaggcacagcgtggtcaggatcagattgtcttcgccggtcagcacgtcgatctcgccgtcatggatcagcgccatggtggcctcggggcagccgccacaatctttgatcgccttgatttgcgggtggcgggcgagttgcctcagcgttgccaactcaaaagttgctccggtgcgataaggcacgttatataaaatcactggcacgcgagaggcatcggcaaggcgggtaaaatactccaccaggcccgtctgcgaagggcgaatataatatggggcggggatcagcacaccggcgatatcgcgctggttgatggcctgctgcatctgcaaggtgctagccatgttattcccggaaaggcccatgaccacctggtgggctggcaccacctcgagcacggcatccagcaccgccaactgttcttctttgctcagggccgcggcttcgccggtcgaaccgcagaccaccacgccagcgacgcccttggcgatcagatactgagccagctttttgactgctgggaaatcaacgtcgtcatgattgaatggggtaaccagtgctacccaaataccggaaaatgaagccatgtaaaactcctgctgcgtgaccgactaggagtcagatgaaaaaaccagaaaggagtatcgcgttgcacaccatccagtcagctcatctgacgggacagcgcgccccggtcaaatgagcggctgtttcttcgaagtaagcgccaaagcttcacccacggtcaacgcggtttgctgcggtgtggcctgttggatgaaaggggacatggcgatctcataacctgtgaatgtcacccgatagtggacaggccacggtcagctgtcaatggataaccagatgataatagggatattaataatagttgggtgcagatgagtttggcttatcaaacagagaccccgctaaagcggggtctgtgatcaacgatgtgggcgcgtgctgatggaggcagtccaactgaaggtggcacctgttggctgtgcccggttggctttgcgttctgcgcgggtcgctttggcaatcttttcacgtgcggccataatgcgatcgatggcttcgtctttaattctattatgttcggagttggtcaactggcgctcgaggtttttgcttgctctgtccagatcggtctttacttcacgttgttcgctttctgtcatctctttcagcgttagtctcttcattttggcaacctgtgttgtgaagttgactttcagtgtacagcatttatggcaaagatattgctctgtagttatcaatgtgctgatcaaacttcttccagcagctcgctgagaaagcggcgcatgcgttcggtgcgtaatgccgccatccttcggcctgccgcagtctgaaacccttcctgtagtttgaacagcttggtttcgaagtgatccagagtgaatcgcttgtcatcatactggcgctgttgcgccagcgggtcggcggcatcatagagggcgctacgcatgcggccaccgatgtagaagcagcgggcaacgccgatcatgccaatcgcatccagcctgtcggcatcctgcaggattttggcctccagcgtttgtgggggaatagcggcggaaaaactgtgtgcctcgatcgcgtgcgcagccttgttgacatccacattagaccaaccaagggttgccagcgcgatgctggctttttctgccgccatgcgggaggccagatgacgctgaggggagtttttctctaccgcaacgcagtcatgcagcaatacggcggcacacagaatttgctggtctcctccttcatcctgactgatttggcaaatatttttccaaacgcggtgcaggtgggccacatcatgcgaaccatcatccccctctagcgtcagcggcagtaacgcttgggctaatgcctgaaatggggagaaggggtgtaacagctctggggagacggttgaagaatgcacaaatcgatccttatcaataggctggaagtgaagagagattactcgttgcgagagttgccgtatttgttgtcgtactcgcgccgatagccgcgcgccttattgcgatcgcggatccatagatagccgcaaaccagtgccaccagggtggaaaatgaaacattacgcatatcccggtcataataaaacaccaacactgcatccagtgccgccaccaaagcaatccacttatacatgtgcgactgccgccgcgtttcggcgttaaggcgtttcaactgtctggcttcatgcaaaaccggcttttgctgcatagtcactcatcatcaatcagtccagttgctaaattagcagattattcccgacagcgtcatagcggataagggctgttatgtcactttctgcatcggtttaaaaatcatgcgctgacggattgtaatcggccaaaaacatgataggttatttattcactatttccggttttatattcagtgggtggcgatgattgtcagaacctggcacggctgcgtgccgctacaacatcggcaaggatttgccgatcatttgcatgtcacaggcgtcaagcatgctaaagagattgcgggcaaccgtggggcttttgtcaggcaagaggtgcagggagactatgcacatttctttctggcaacctattggacctcactggaggccatcaagtgtttcgccggtgaagcctatcaggtagcggtaacttatccggatgatgaagccttcgcgctgatctccgatccttacgtgtttcaccatcaggtggatgaaatcgtcgagctttaacctcgattcaacgttatgcaggggattatgatgaacagcaaaacagtacgcccagaagagatcgtgcaacagcagcttgatgcctacaatgcccgtgatatcgacgcttttatggcctgctgggccgacgatgcgctgtattatcagcatccggatacgttgcttgcccgtggtaaaggagaaattcgtgagcgtcatattgcccgcttccaagagcctagcctttacggtgagcgtatcaaacgtatggtggtagagaatttggtgatcgaccaagaggtggtcacgcgcaattttccacagggacgcgggaagatggacgtcattgccatctatgagattgagcagggtaagatcgccaaggcctggtttaagattgggccttgtgaactggatgagggcgcattatagcgcccctgatttacagtgccaaaatggcttcgatctcgacgttgagatctggcgaaaacagggcgctgacggcaaccagagaactggcaggaagcgcaccgtccagatagtcgaacagaacgtcacggatggccgccaggtcggttatatcggtcagaaaaacggtgatcttgatcagtgatttaagattggtgccctcgctggcagcaacggccgcaagctgttccagtatggcgcgagcctggtcttgtaccgtttgcccttgggcttcggtggcaaaggcggtcaggccagagacgtacagcgtatcggcgtggcgtaccgcgtgcacatagggcccacccggcttaggtaattttgtatagttggtacgtttgagtaatgacatgatgaccccaggagatgaccaagagcacgcactcatcagcgcgtgcagccgaaatttttgcaggatgccgcctgataatactatcatctcaggcagtcatttccgcaataagggtgcataagggtgatcaaccaggcatttattccttatctgcaacgttggcaacttgagccagacggtccagcgtttgaaacccacagcagcctgttgatgccggtacgctatcaaatgatgcccgcaatgctgaaaattgcccgcgaacaggaagaaaaatttggcgggttactgatgtgctggtggcgtggggaaggtgctgcgcgggtgttggcctggcatgatgacggcattttactggaaagggccatggggccgtcgtcattgtcacagctggtacgcaacggtgaagaccaacgggcaaccgctattctgtgtcaggtcattgcccgattgcatgcgccacgagatgaaccttaccccgaattgatccccttgcatcagtggtttaatgccttatggcctgcagcgcaggcccatggaggcatgctgcgcttgagtgccaccgcggcagcagaactgctgaccagcccacgggatcagggagtgttacatggagatattcaccatgacaacgtgctggattttgccgaacgcggctggttagtgatcgatcccaagcgtctgtatggcgagcgtggatttgattacgccaatatcttctgcaatcccaattacggtgtcgccaccgaccccgatatcttccatcgtcgtgttgaacaggtttgctcgctggctggattggaacgttgccgcctgctgcagtggatcctcgcctgggcggggctttccgcagcctggtttttggaggatggtgagcaagcggatatcgatttccgcgtggcagaactggcggcgcgtgccctgggtatcgcgctgccgcagggcgataacggatttatcctgccaaccgtcgagagccaatagcgagattcaaggcattttgcgccgtggtaatgagaaaatagcgtaagccagcacgccgccaatcagcccccagaacgcagcccccacgtttaacaacgtcagcccggaagcggtgatcagaaaggtgatcaccgcagcatcccgctgtttatcatcctggagtgcgcgttgcaaactaccggcaatggtgcctaataacgccagccctgcgatggtatggatcaaggttaccggcagcgcgctgaacagcatgccgatggtaccgccgaacacccccgctaacagataaaagccaccggcggccacggcagccatataacggcgcttgggatcgggatgaacgtccggccccatgcaaatggcggcggtgatggccgcaatacacaccgtgaagccgccgaagggcgccagcaccagagccgtcagggcggtccaactgattaatggtgaagtggggacgtcatacccgccagccttgagagtggcgatgccaggcgcgttctgcgaggccatcgtcacgacaaagaaaggaatacctatgcccagcaatgtcgacagcgtgaagtgcggagcgataaattccggcttggcgaaggacagcgtttgttgggtgaaatgaatgttaccctgtaacgctgcgatgatcagcccagcaagcaacgttagaacgatcccgtaacgcggcagatagcggcgggggaaaagatacaccaggcacataccggcgctgagtgaaaaattgatctgcaaggaagcaaaggcatccaacccgaagcggagcaatattccggccagcatcgctgccgatatggcctgcgggatatggttcatcaacctggcaaacaggccggtgacaccacacagcaggatcagcccgctggcaaaaataaataccccgatggcctcattgagcggggttccaggcaaactggtgaccagcaacgcggcaccgggcgtcgaccaggcggtgaggattggcgtacggtaatagagcgagagccccaacgaagtgatacccatacctagaccaagcatgctcagccagccgccaatttgtatcgggctggcacccgcagctgcagcggcctgaaagataatcgctgcagaactggtgtagcctaccagcacggcgacaaaaccggcaacgatggcagaaaaggagatatcacgtaatgagagtgctagacgcataaccgctcccgagtagtgtgcgttataacggtcgaattgacggagcatagcatcgtgcgttatagcgcacaagaggctataatcaccgcaggtttttcaggagaatagttatgcaggatcttgccagccatttggcgcaaacgctgaagtcattacgtacgcaacgcggttggagccttaatcaggctgccgaaaatacgggcgtcagcaaggcgatgctggggcagatcgaacggggtgaatccagcccaacggtggcgaccttatggaaaattgcgaccgggtttaacgtggctttctctgcctttctggaaacggcgccgctgcagccggcggctatgctgcatcgacatggtgagttgcccatcttccatcaagacaatgccgatctgcgtgtggtgccgcttttcccattcgaccgccaactgggttttgatatgtttgtgatcgacttggctcctggcgcgctcagtgaatcctcggctcatgagccgggcgtgattgaacatgtcattgtcatcagtggccaacttgaactggcgattaacggcgagtggcatagccttgccagcggcgaagccatgcgtttccgggcggattgcccacatgcgtatcataatgccagcgcggagccggtacgtattcacgacttgatccattacccacgggtttaaaccggatttaatcgcagcagtgaattttgacgtgctaagtcgaaaacgtgtcaacgctactcaggacgggtcacatcataaaaaaacgccgaagctaggctccggcgtttttgagatcaggttacagcagagattacagtgcagcagctttcgcttttgctgccgtatcttctgcggtatccagcgtcatgcggtacagcttcggtgcggtcagcatcatcagtacggcgatcaccgccgtagcgataccaatctgcataaacacgtggctatagatagccaaagaagcatgcgcatcgttgatgtcgcttgggacggcggtcagacccgcgaccttaccggcgatcagcgcggcggcggcggtggtcaggaaccaggaacccatgataaagcccatcaggcgctgtggtaccaactgggcgaccatggccaagcccagaccagagatcatcaactcaccgatactctgcagcgcatagctcaagattagccagttaacggacacgatgccctggtcgttggcgaagcttgcgccccacggcagcaccaggaacgccccggaacacaggatcatgccgaaggcaaacttgtgcggcattggcagacgatcgcccatcttgttatacagcgcggcgagaatagggctggccatcatgatccagaacgggttcagtgcctgatactgctctggctcaaaagcgatccctagaatattgtgctcaacgttgtggatagcaaagaagttcagtgaggttggcatttggctgtacaacacgaagaacactactgcttcgagcatcagcaggaaggccacgatcattttacgacgtgcggcgccgtgtaaggcgaaggtttccttggcgaacacgatgacgatacccacagagatgatagccagtgcccagcgcgcgataatctggttgtgcagcaaccagctggaaatagcgatcaacgccactacaccaacgatcaccatcagcagttttttgacctgcaggggcttaaagtcaggttttgaaccgtattgcttaacccagccgtggcacatcataaagttgaccagggtgatcagcatccccaccacgctcagtgagaaggcgacgctccagccatatttggccgctagccatggggttgccagcatggagaagaatgagccgatgttgacggacatatagtacatggtaaatgcaccgtccaaacgcggatcgtctttctcatagcaggtagacagcagggaagaagggttggctttaaacagaccgctacccacggcgatggtggccatccccaggtaaacccagaagatatcatgaccagaataggccaccatggcgtaaccggcggccagcacgatggcccccaagacgatcacccgcttggagccaagaactttatcccccaaccagccgccaatggccacgaaaccgtacaccagcgcgctgaatgaggagaacagcgtaatcgagtcggcttcactcaggccaagcatcttgaccagatagaccgccatgatgccttgcagaccgtagtagccgaaacgttcccagagttcaatcgagaagatcaggtagaaggccttaggttgcttaaacgcgttaaggctaatgttttccgaagaattgttgtttgcagttgacactggtacctctggttttttcactacccgtattgtcaggacgggaaatagcagaatgtgatgcagggctgcacacttctgcattgttataggatgaatgccggcggttaatgttcactatctttgtcaacgtggcaagctttttgacatgttctgttacatataacataggcaacgctatgcaactatgttgcaaatgttatgcagtattaacgtttgcgattattaaatttgccgagtttttgttttgattaaaagctatcctgaattaatttagttatatcttctgctatttaatccatatccagtccataccaatgcacatgattgattaggccttggtttgttgtgcataaattgggttatgcaaaatatctgaaaatgaacggatcggtagtgaggtttgtaaatgagatgtgatcgtcaagacgtgaggttaaccacaatttttgactaattttgcggttgaaaatatctgaaacagcgagtttgtagggtaatcccgggttccaccaaggttaatgctgcttgaagtcacatttttgataaaaaaccggagggaagagtcgcggacacggagcgccgtgcccggcaggctcagtttagcggatagaccttctctttaaactcgcacaggtcttcgataatgcatgaaccacagcgcggtttacgggcgatacaggtatagcgaccatgcaggataaaccagtgatggcagtcgactttaaactcggcgggaaccactttcagcagcttttcctctacctgctccacgtttttccctggggcgaagtgggtgcggttacagacgcggaagatatgggtatcaacagcaatggttggccaaccgaaggccgtgttcaacaccacattggccgttttgcgccccacgccgggcagggcttcgagtgccgcgcgatcttccggtacttcaccgtcatgcttttccagcaggatacggcaggttttaatcacgttctcggctttgctgttaaacaggccgatggttttgatgtactctttgacgccgtctacccctaacgccagcatggccgctggcgtgttggcaaccggatagagcttggccgtggccttgttaacgctaacgtcggttgcctgagcggagagcagcacggaaatcaacagctcaaaaggggtggtatacaccagctcggtggtcggatgcgggtcgttatcccgcaagcgggtcaggatctccaggcgtttctctttattcatagcgctttctctacgtgtccctgttccatgttaggttcaactgtcaaagccttggctttacgcgccttcattttttcgtcaatcagatatttggttgccagcatcaaccccagaccgataaaggcacccggtggcagcatggccagcaggaaaggggtgtcgaaatggacaatctcaatgcgcagcaccttggcccaactgcccagcagcaggtcagcgccatcaaatagcgtaccgttaccaatcagctcgcgtagtgagcccagcacaaacatggcgctggtggcaccaaggccgatggccataccgtcgatcaaggccagtcctaccggttttcgcgccgctactgcttcagcccggcccaccacgatgcagttggtgacgatcagcgggataaatatccccaacgattgatacaggccaaaagcgtaggcgttgatcagcatttgcacgatactcaccgcggcagcaatgatcatcacataaatgggaatgcggacctcgctcgggatccaacgtcgcagggcggaaatggaaccgttggtaatggtcagcaccagcgtggtggctagcccaagccccaaggcgttggtggcagttgacgttaccgccagcagcggacacagccccaataattggactaacgcagagttgtttttccacaacccctgtacgattaactctttggcttcactcattcgctggctccgcaggcaggcaaggtatccagtttaggcggcagtgtctccataaacaacgctgtacgacgcacggcgttgaccacggctcgcggggtaatggtggccccagtgaactgatcaaacatcccgccgtctttcttcactgcccaacgtttgtcatccgggccgtcgatctttttaccgctgaagaaggtgatccagtcggtaatacgtaattcgattttgtcgcctagcccgggcgtttcgtgatgttctatcacgcgcgttcccaataccgtgccgttaaaatcggccccgaccagcagttggatcgccccagaataaccgtctggcgcggtcgtttccaacgcggcggccaccagttgaccattcttgcgggccagatacagagggtgcggcgcgccgttgcctaacgccggatcgctgaccagcaggcattcgctctgcatatcgttgtcataatgttccggcgggacgacctggtccagcagcgctttttgttgcaacgcggcctggtgggcaatggtggttttggttaactggtacaccacggcggtcaggcctgtggtgaccgcggcaaacacggccagtgtggtgccatgctttctcatggaattaagcatattgactcctcaacggtggccatacacgcgtggctgcgtgtagtgatcgatcaacggtacggtaatgttggctagcagtacggcaaaggctaccccgtcgggataaccgccatatacgcggatcagccagaccagcaagccaaccaggccgccgtatatcagccgccctttgggcgtggtagaggcactgaccgggtcggtggcaataaagaaagccccgagcatagtggccccggaaaacaggtggatcagcggggaagcctgatgggcgggatctaacgtccaggctactcctgagcacagggcaatgacggccaacatgctgaacgggatttgccagtggatcagcttacggcccagcataaacaggccgccgagcaggaagcccaggttaatccactgccagccgatgccggccagggtgccgccgaacagtggttgctggagtacctgttccaccgagtggccgctgcgtaggccggttttaaagccgtctaatggcgtggcctggctgatgccatcaacgcccatctgcaattcgtgcagagtggctccctgggcggtgtggccgctgaaaatagctagcagggtatcgggcagggtcagggcggtagcacgcagttcttccggggggagccaactggtcatctgtaccgggaaggagattaacagcaccacgtaacccaccatggccgggttgaaagggttttgccccagtccaccgtatagctgtttagcgatcacaatggcgaaaaaggtgccgataacgatcatccaccagggagccagcggtggcaggctaatgcccagcaacagcgcagtgagcagggcggaattatctgccagccgtgccttgactggctgtttacgtagcgcaagaatggcggcctcggccccgagggcggtcaccatggccagcgcggtctgaataaggttgccatagccaaagaaccacacctgtgcagccatgccaggaatgcaggccagcataacccaaagcatgatacggctggtgctttgctggttatgggtaaacggagagctggcgatgtgtaagcccttgggggctgcctgttgtaccggcctgaacttcatagaataactaccatttctttgccatgttaatcagtgcattcacggtgcgggcaccgggggaaattacagcgctgcattctacctcaatcatatgctgggtaatacgtgctaatcataaggatattcagcttttgcggtaaggaaaagccaggctggatgtaaaacgtgcagtatgggttgtcatactgatgatcgagctgctatttttggactgctttgcgcacggaataacaactttcatataattaacgtaggttactatcctgagcatttttgaagtagcgaacaactaataatgactaatgaagatattttatttattgaagagctgattgaatgggtcgaaattcatctggagactcggccaaatctggacgaagttgcgcgtatctccggttactccaagtggcacctgcagcgtaagttcaagcgtatcaccggtatccagctcgccacctatattcgctcacgcattcttacccgtgcggcggtcgcgctgcgtatcagcaaccgtacgattatcgatatctccgatgaattgggctttgattcacagcagacctttacccggatgtttaagcaacgttttggcattacgccaaaccgctaccgtaccatggagaaatgggacgtgaagagcctgatgccgcgcttcgacttcgaagccgtgtatgaggcaggtttttatcctgagatacaacggctgacgttgccggatacgcacctggtcggttttacgcgtgagatggaatttgatacagcccaagagatggcaatttcgtcctgtatcgccatgaagggggaaatctttaatgacttcttcaaagggctgaatatggagtgccacaaggtttacagcatccattctgacaatgagcgcggcgaaggcgagtgttcggtcacgcataccatggcggtggagccggaattcaagaaggacatcctttctggtcacaagattgaagatattcgcttgccagcgcgtgagtacatcgcgattacccatcaggggacggccaaagagtgcgtgaaatttatctcttacctgatctcgcatgtgatgccggggctgcgtaatgaagtacgcggaagcgtagagatggaggtgatcgaagctaaggcgtggaaccaggatgccaaactgcggcagatcgatgtcaattacacctacctgatttctattgattaagtggggccttgcgttcggcaagaccccatggcgtttactctttatctaccatcgctagctgctgtgcggcttttttggccttgactcgggccagcgcggcggcaacggcggccttgcgcggatcctccggttcnnnnnnnnnnnnnnnnnnnnnnnnnnnnnnnnnnnnnnnnnnnnnnnnnnnnnnnnnnnnnnnnnnnnnnnnnnnnnnnnnnnnnnnnnnnnnnnnnnnnnnnnnnnnnnnagcagccttgcgcggatcctccggttcnnnnnnnnnnnnnnnnnnnnnnnnnnnnnnnnnnnnnnnnnnnnnnnnnnntgccgcctttttcgccttcacgcgggctaatgctgccgctaccgcagccttacgcggatcctctgaagttaccgtttccgtcacgctctcggcgtcttgcgcctgcgccgctttcttggctttgactcgtgccaacgccgcagccacggccgctttacgtggatcgtcgtcttgtaccgctgctgcaggcatttcgcttgcttgctcgagcttacgttctctggcctgtgccttacgcgcttcgcgggcagcaatggcagcgctgttatccggctcctggccggtgatagcaatgccagcagcctcactgtttttactgcgcacgcgagccagcgccgcctgaacggcatcctgatcgctgtcggtcagtttcaccgcagcctttttatgacgctcttcgcgcgccagtttctctcgctctaaacgagccagcttagcttcatagcgtgctttggcctcggcggttcgtgccgcttcctgatccaacgcgttaatctcagccttctcttggcgataatattgcaccagcggaatattgctggggcagacgtaggcacaggcaccacattcgatacagtcgaacagattgtgcttacgcgccttctcgtgctcttcgccacggctgaaccagtaaagctgttgcggcaacagcccagcagggcaggcatcaacgcacaacccacagcggatacaggactgctctggttcttgtacggccatttcgtcaaccgtcggggccagcaagcagttgctgattttgacgatcggaacgtctaacgttggcagcgtaaagcccatcagtgggccgcccatcaccaccatctgctgggattgcggacgatagccgccaaaggccagcaggtgttgcactggcgtgccgaggcgcgcccagacgttgccaggtcggctcatggcctcaccggttaaggtgacgacgcgctcaatcaacggttcgccatcgacaatcgcccgcttgatggcaaaggcggtgcccacgttctgcatcagcacgccgatggtggacgaacgcttgccgtgaggcacttctttgcccgtcagaattttggttaactgcttggcaccgccggaagggtatttggtggggatcacccgcagggcgatcccatcctgcccgcgtaaagcggctttcagagcggcgatggcttccggcttgttatcttcgataccgatcagcgtcaccttgggttgtagcaggtggcgcaggatctgggtgccttcgataatctgagcggcctgttcctgcatcagccgatcgtcggcggtgatgtagggttcgcattccgcagcgttgaggatcagggtttccacctcttcgcggccgccttgcagcttactggccgttgggaaacctgcgccccccagaccggcaatcccggcctgatgaatacgttggatcagctctaccgcatccagttggcggtaatcggcgaccggcgtcagttcgcaccagcgatcttcaccgtctggatcgataatcacgcacagttccgccagccctgaagggtgggcggtaacgtgaggctcaatggcgcggatggtgccggaggttggcgcatgtaccggcaaggtgcggccacggccaaaggtcagcggttggcctttcagtacgcggtcaccggctttgacacacagctcgccttctggccccagatgctgttgcaaggggacgataaaaatgtctggcaggggagccacgcgcagtggcacaccgctggactgggtcttcatttcaggtggatgaatgccaccgtcaaaatcccaaatccgatcttttttcaaagcggcgaacagattaaacatgttgctccacggagatcacttgcactggaatagtttgcatatcccatttccagctggcggtcgtagtggcgaccggtttcatttcaatacagtcggttggacagggtgcaacgcacagatcacagccggtacagagatcggtaatgaccgtgtgcatggcgcgggtggcgcccacgatggcgtccaccgggcaggcctgaatgcacttggtgcagccgatgcagttggcttcgtcaataaaggcgaccttacgtaccggttcggccacggcagcaccgccgtccagcggttgtggctcaacgttcagtaattcggccagcttgagcatcacctgctcgccacccggggcgcatttgttgatcatctcgccattggcaaccgcttcggcataggggcgacagccaggataaccgcattggccacattggctctgcggcaaaatttcgtcgatctgttcggcaaccggatcttcttccacttcaaagcggcgcgcggcaaagcccagcaccaggccaaacagcagccccagagcgcttaatgccgcgaccgcaatccacaacgcagtcattagaatctcaccagcccggtaaagcccataaaggccagagacatcaggccagcggtgatcaaggcgatggaggaaccgcgaaacggcgcgggcacatcggctaccgccaggcgttcacggatggcagcaaacagtaccatcaccaatgagaagcctgcggcggcgctaaagccataaacagcagactgcaggaagttgtagccaaggttgacgttgagcaacgccacgcctaacactgcgcagttggtggtgatcagcgggaggaaaatccccagcaggcgatagagcgccgggctggttttacgcaccaccatttcggtgaattgcaccacgacggcgatcaccagaataaaggacagcgtgcgcagataaaccagatccaacgggatcaggataaagctgttgattagccaggcgcagaccgaggccagcgtcatcacgaatgtggtggccatgcccatgccgatggcactttccagtttcttggaaacgcccataaaggggcacaggcccaggaatttcaccaggacaaagttgttcaccagtacggtgccaacaaacaagagcaggtattcggtcattgcaatgcctaaaaaaataaaagccgcctattatcggtaatcggcggcgtaacgacaacatactaatcgcaagggtattgcgcttttttgctcgttttgttgaaaatttacacagcagggcgatcaaatcgtgccttgccgtggttacttctcggtgaaggtgcctttcacgcgctgggaacgcttaaaatagggcaccagcagggcggccatcaccaacggccataacaggctacgcacggccagttcatcgggcacgggggcaaaggcgaacgccttgatcgccaatagcacggtgatcagcagccagaccagaaacagctttggaaaacgttgtgaacgttggcagaacagccacagcaggtacagcgtaaagcaccacattaccagcgtggtgatcaccgatagataccactgcgtggagaaggcctgagcattggtgctcagatactcgcgtgattcgggcataaaaatggccataccgtacagggccaacatcaggctggcgctgagcagggtaacgatcagataggccatcggggctagcagccaaccgccaatgcgcgaatattcagcttgggtcatacgagatcctgagtggtattccaacgaagtaagccgcatagcttactcaaatatgtgctaatgcgcgaggagaaggcggcaccaacgacaaaatgccagtcagattgcgctgactggcatgacatggcttacaaacctcagccggttctcattgtcgggggcgctgcatgctgcgcccacttagcggcagttaacgttccgcaccgttgctggcgatcagtttctggtaccagaagaagctcttcttacgctggcgcgccagatccttgttgtggtcaacgtagataaagccgtactgcttctggaagccgttgagccagctcagcagatcgataaacgaccatgggtaatagccgcgcacgtcggcgccctgtttgatggcgtcttcaatggcaccaatgtgctggcgcagatagtcgatacgatcgtcatccaccacctcaccatcgataatcggatctttggctccgagaccgttctcggtgatgtagataggaatatcaccgtaacgcgccttgatattcatgatgccttcggtaaggccctgcggataaatctcccagtcccaatcggtatacacgccgttcggattgcggacgaacttgaacagccccttaaagccgaattcgttaccttgctggtggccgctgcctttctcaccggtggtgttgatggtcagatgtgactcttgattattggccgcgatggtttcacgcttgtaatagttcaggccaataaagtcacagatattgtcgcgcagcagttgctcatcacctggtgcgaattgcggtacgccccacagcgcctgagtctgcgccagcagttcagccggatattcccctttcagcaccggatcgtacagccagtgggtaaagatcccttcggccaactgataggccgccagatcttccgcagactggctgagcggggtatgggtttgcaacacgttgacgaagccgatttgaccggcaatgccgctggtgcggaatgcagccaccgctttggcgtgggccacaaagacgtggtggcaggcctggatagcgcgcgccgggttctgtacgcccggtgggtggccgccggtgatgtaaccgaagccgataaagcacacggtttcattgaaggtagaccagagtttgacgcgatcgccgtaacgctggtaacacaggcgggcatactcttcaaaagcctcagcagtgctgcgagcttcccaaccaccttcatcttgcaatgcctgcggcagatcccagtggtatagggtgatcatcggctcaatattgtgttccaacagggcatcgatcagatcgctgtagaatttgaccccggcctcattgatggtgcctcggccctgtggcagcaggcgcggccaggagattgagaaccggtagctctgcatccccatttcggccatcagcgccacgtcctcacggaagcggtgatagtgatcgacggcaacgtcgccgttagtgccttggtaagtggtacctggcaggtgggagaaggtatcccagatggatgggcctttgccgtcggcatcgtgtgcgccttcaacctgatacgccgcgctagccgcgccccagaggaactctttcgggaaagcagacataactattctctctatacgttaaatattgagtctagtttaggtcgagttgaaatgagtttgcaaccggtttctgaaaccggttgcagtttttgcgtgcgcgtttagcggcggttgatttggtagtaggtttcattccagcggatttcgttcttgaacgctggcagggtggtgtcgttatcgatcagcaggaattcgatgttgtgcatctcggcatacaggcgcaggtagtcggcgttcagtgactgcgagaacaccgtgtggtgtgcgccgcccgccaggatccaggcttccgccgctgtagccagggaaggttgagcacgccagatcgcccgagccaccggcagtttaggtaacggtttaggctgctcaatggtatccacctgattgaccagcaggcggaaacgatcgcccatatcgatcaggctggcgttcaccgccgggcctgccggggtagagaagatcaggcgggccggatcggccttgccaccgatgcccagatattgaatatccagcagtggcttgtgttctttggcgatggaagggcagacttccagcatatgggaccccaccaccagatcgttgcccggctggaagttgtaggtgtaatcctccataaacgaggtgccgccgtttaagccgttgcccatcactttcataatgcgcagcagcgccgcggttttccagtcgccctcaccggcaaaaccgtagccttgctgcatcaggcgctgtaccgctaaacctggcaactgcttcatgccgtgcagcgtttcaaagttggtggtgaaagcgtggaacttgccctgttcgaggaaacgcttcatacccagttcgatagcggctgcatcgatcaggttctgccgtttggcgccgttaactttagccacgtcactcagctcatagctggcttcgtactcttcgatcagcgcatcgatatcgcccttgctcacttcatcgatcacgctgaccaaatcaccgatgccataagcgtccacggaataaccaaactggatctgtgcggccactttatcgccatcggtcacggcgacctggcgcatgttgtcaccaaaacgcgccaccttcagctgctggctttcctgtttggcgcaggcaacacgcatccattgagcgatacgctcctgggcatttttgtcctgccagtggcccgcgatcacgctgtgctgctggcgcatacgagcaccgataaacccgaactcacggccaccgtgggcggtctggttcaggttcataaagtccatatccatgctgtcccacggaacttcggcattaaattgggtatggaactggagcagcggtttatcgaggatagacaggccggcaatccacattttggccggtgagaaggtgtgcagccaggtgatgatgccgacgcagtcctggtgatagttggcatctcggcagacggtggtgatttcgtccggcgtggtgaccagcggtttcagcaccattttcagcggtaaacctgcgtcacggttcaggctgttcacgacctgctcggcgtttttcatcacctgttgcaaggttttggggccatagagatgctggctgccgatcacgaaccacacttcacgttgtttaaagatgttcatcaaaaactcctggatctagaggttttattgagccggtggggtctgccccggcgtattaatttttggttgtcacggcaaaccgcggctctgcggcctggcaccactgttgatagcgttcataaagttgttggtagcgaacgacgttagcaggatcgggctgcaaagtgcgttcaatgctgcaagccatatgctgctgagcttgcggaacgtcactgaaatgcccggcggccacggcagcgaagatggccgcacccagcgcgcagcattggtcggaggcgacaatctgtagcgggcgatccatcacatcagcgcaaacctgcataattaccggtgacttgcgggcaatgccgcctaaagccagcacgttatcgacgggaatgtcttgctgttcgaagcactccatgatggcacgagcgccaaaagcggttgcggcaataaagccaccaaacagcgtgggcgcatcggtaccaaggttgagatcggtgatcactcctttaagacgctggttagcgtagggggtgcggcggccattgaaccagtccaatacgacgggtagatggtctagcgacgggtttttggcccaggcagcggtcagggcggccagcatgtcatgctcgatttgttgcagctgtgtctggagttgcggttgcgtcctggcggcttcacgcagtggccagctcagcaggcggctgaaccaggcgtacatatctccaaaagcagattgcccggcctccatgccgatggtttgcggcactacgctgccgtccacctggccgcagatgccgctgatggcacgatcgcccacgcgctcacgatcggcgatcagaatgtcgcaggtcgacgtgccaattactttcaccagcgtataaggctgcgctccggcccccacggcccccatgtgacagtcaaaggcaccaccagaaagcaccacgctttctgacagcccaagccgtgtggcccactctttgctcagcgtccccaccggcaaatcggcagtgtaggaatcgttgaacagtggatagggcagatcttccaccagcaacggatccaaggccgcaaagaaggctttaggtggcagaccgtcccagtctggatgccataacgttttatgccctacgctgcaacgcccgcgctttaaccgatccggtgcggtagtgccagaaagcagtgctggcacccagtcgcacagttctacccaagaggcggcggcatggcgtaccgcctcatcctggcgtgaaacgtgcaagatcttggcccagaaccactcagaggagtaaacgccgccgatatagcgtgaatagtcggggaaatctccgcggcggcacagttggttaatcgcctcggcttcctcgatggcggtgtggtctttccacagtacaaacatggcgttgggattgctggcaaactccggccgcaacgccaatacgtcgccctgttcatcaatcggtgcgggagtggagccggtggaatcaaccccaatcccgaccccggcctgccgctgttcctggctcatgcgctgtaccacggcgacgacggcttgctccatggcttcgatatagtcgagtggatggtggcggaactggttctgcgcggcgttacaaaagtcaccacgctgccagcgagggtagtagaccacctcggtatccagttcgttgccgttttgacagtcgacagccagtacccgcactgaatcgctgccgaagtctaatcccagggcaatagcacctgccgtcatgatgcggactccttacttgttaggttgaggttaacgataggagcgggacggggaggcaggtgaggaagcattggctggaagtatgcacttttctgcttgctacagtgattttgtgatgggggtcaaaagttatcacttggttaaatttgctaaatgtatgcacatatctgctgttatctcgggatgtgatagcgctctacatttagctaacaaataccggctaaaactgtttgcgtcttacctgagtcgacggcaagaagcgagatataaggccattgccgtgacaggatctcataatgataacgttttcacggtgactcggtttttctgccgatgaaagcaaaacagcggagagtaccatgcataaattcactaaggcgttggcagttatcggtctgacggcggttatgtcacattcggctgtcgcagagaccatgaaactgggttttttggttaaacagccagaagagccctggttccagaccgaatggaaatttgccgacaaggcgggtaaggacctggggtttgaagtgatcaagattgccgtgccggacggcgagaaaaccctcaatgccatcgacagcctggcggccagcggggccaaggggtttgtcatctgcaccccagacccgaagctaggctcggcgattgtcgccaaggcgcgcagctatgacctgaaagtgatcgcggttgacgaccagtttgttaatgccaaaggcaaaccgatggagagcgtaccgctagtgatgatggcggccaccaagataggtgagcgccaaggcgaagagctgtggaaagagatgaacaagcgtggctggaaagtggcagagaccggcgtaatggcgatcacctccgatgaactggacaccgcgcgccgccgtaccggtggctctatggacgcattgaaaactgccggtttcccacaacagcaaatctacaaggtaccgaccaaatccaacgatatcccaggggcattcgatgccgccaactcgatgctggtgcagcatccggaagtgaaaaactggctgatcgtcgggatgaacgacaacaccgtgctggggggcgtgcgtgccactgaaggccagggttttaaagcgcctaacgtgatcggcattggtatcaacggcgttgatgcggtaagcgagctttccaagaaacaggctaccggcttctacggctcactgctgccaagcccggatattcatggctacaagagcattcagatgctgcatgactgggtagagaaaggcgtagaaccagagaaatttaccgaagtgaccgacgtggtgctgatcacccgcgacaacttccaggtggaactgcagaaaaaaggtttgatgtaaggggtgtgccgcctgcatcaagtgggcggccatttatcgcacagcattgaggaaagcactatgactgccgtcacgccctatctggctttcaaaggcatcggtaaaagcttccctggcgtcaaagcgctggatgatatcagtttcagctgtcaggccgggcagatccacgcactgatgggggaaaacggcgccgggaaatcgacgctgctgaaaattctcagcggcaattatgccccaagcaaaggggagatccacctccaggggaaagcggtgcagtttgccaataccaccgacgcgttgaacgccggggtggcgattatctaccaggagctacatctggtaccggaaatgaccgtggcagagaacatctacctggggcagttgccgaccaaacatggcctggtggatcgcaaactgctgcgttatgagtcccgcttacagctggaacacctcgggttggacatcgatccggatactccgttgaagtacctgtcgattggccagtggcaggtggggggganatggtggagattgccaaggctctggcgcgtaacgccaaagtgattgcgtttgatgagccgaccagttcgctgtcggcacgtgaaattgagcaactgttccgagtgatccgcgagctgcgcgccgaaggcagggtgatcctgtatgtctcgcaccggatggaggaaatctttgcgctgagtgatgccatcaccgtgtttaaggatggccgctatgtgcgcaccttcgacgatatgcagcaggtaaacaatgaagtgctggtgcaagcgatggtggggcgcgatcttggcgatgtttatggctatcagccacgcgagctgggagaagtgcggttgcagcttaccgatttgcaggccgccggggtgaaaacgcctatcagctttaacgttcgcgctggcgaaattgttggcctgtttggtctggtgggcgcagggcgcagcgaactgatgaaagggatttttggcgctacgcgggtaactgcgggccaattgatgcttgatggcaagcggctcaatgttcgttcaccgatcgatgctattcgtgcgggcgtgatgttgtgcccggaagatcgtaaggccgacggcatcattccggtgcattcggtacgtgacaatatcaacatcagcgctcgccgcaaaagcatcaaggcgggctgcctgatcgataacgcctgggaaaccagcaatgccgatcaccatatccgcgcgctgaatatcaaaaccccaacggcagaacaattgatcatgaatctctccggtggcaaccaacagaaggcgatcctgggccgctggctgtcggaagagatgaaggtgatcctgctggatgagccgacacgcggcattgacgttggcgcaaaacacgaaatctaccacgtgatttatcaactggcgcagcagggcattgcggtgctgttcgcttccagcgatttgcccgaagtgctggggctggcggatcgcatcatcgtgatgcgtgaaggggcgatttctggcgagttgacccatagcgaggccactgaggaaaaagctctcagcctggcgatgttacgtacccccgatattgcagcggcgatggcctgattgcgaaggagcaagagatgtcgagcatgacaaccaattctgtgaaaaaccgcggtggccttgggttggcgcgtatctgggacagctatggcatgctggtggtattcgccgtgctgtttgttgcctgcgtcgtgtttgtgccgaatttcggcagctttatcaatatgaagggcctgggtctggcgatctccatgtccgggatggtggcgtgcggcatgctgttttgtctcgcctcaggtgattttgacctgtcggtggcgtcggttatcgcctgtgcaggtgtcaccgcggcggtggtcatcaacatgaccgagagcctgtggatcggcgtggctgccggtttgctgttgggcgtgctttctgggctgatcaatggttttgtgatcgcccggctgaagattaacgcgctgatcaccaccttggctaccatgcagatcttccgcggtctggcctatattatttccgatgggaaagcggtggggatcgaagatgagcgtttctttgcgctcggttatgccaactggttggggctgcccgccccgatttggatcaccataggctgcctgatcctgtttggtttcctgctcaataaaaccacctttggccgcaatacactggcaataggtggcaacgaggaggcagctcggctggccggggtgccagtagtgcgcaccaagatcatcatctttgtgctttccgggctggtatccgccgctgcgggcattattttggcttcgcgtatgaccagcggccagccgatgacttcaatcggctatgagctgatcgtgatctcagcctgcgtgctggggggcgtttcactcaaagggggcataggcaaaatttcctacgttatcgctgggatcctgatcctgggcacggtggagaacgccatgaacctgctgaatatctcgccgttctcgcagtatgtggtgcgcggcgtgatcctgctggccgcggtgatttttgaccgctacaagcaacaagcgaagagcagggcgtgaagacccatcacaattttgctattgccgcgagcagcattttgccaaatgggtaaacttgctataggtggatagtgtgttgtcgtttattgagcaatctctattttcccctcaccccaaccctctccccaaaggagagggagctgcacggagcgcgtggttggcccgtgcagcttcggtaagtaggtagtaagaggaaaggcaggtattacacagaaaaatcaacgaactcgatcggttccctctccctgtgggagagggttagggtgagggaagcagaccactcatcttgccaagttttgggataaagaaacgacacatttggaggccagatgtatcatcgcatggttcaggaaccccaaccgaacccgttgttgccgggttacacctttaacgcctacctggttgccgggctgacgccgattatggcggacgggccgctggatttctttatcgatcgtcccggcggcatgaagggttacatcctcaatctgaccattaaaggccagggcaaggtgtttgacggtgaggagacgctttactgtaatcctggcgatctactgctgttcccgcccaaggcggcgcataactatggccgatcaccggatagtgactgctggtatcaccgctgggtctatttccgcccgcgtgcctattgggcagactggctggaatggcacagcaaggcgcatcaggtggggcgtctgacgttgcccaacaaccagttgctgacggagtttgaccggctgtttgccaacattgagcagacccaacgttccggccgacgttttgccgaagagattggcatgaacctgctggaacggctgttgctgcgcgcgatggaggaggatcccctcagcccgcagaagattatggacccacgggtgattgaggcttgccagttcattaccggcaatctggcgggggagctgcgtattgatgaagtggcacgccacgtttgtctttccccttcgcggctggcgcatctgttccgtgatcaggtagggattaatatcctgcgctggcgtgaagatcagcgggtgatccgtgccaaactgctgctgcaaaccacccaggagtcgattgccaccattggccgggtagttggctacgacgatcagctctatttttcgcgggtgtttcgcaagcgggttggcgtcagccccagcgattttcgccgccgcagcctggagataaactacccggtgagccattcacgtgatcggccactgattgccgcatcccgttaatcatcctgaggatacgaacgttgttgggggcgccgcatgctgcgcccgatttatcgcatgccatgcccgcttagccatactgccagtttgtaatcaatctgcatttagctcttgttccatcccccagcatggtgtcaaatcgaatcaattgctacttcatctttttctagcggcaacactcaggagcgggtttctcgccgcaacttacaaggacgtagcatttcaactgcctggaattgatgcatatatcgccctgtatgaggaaacaagatgtctgaaacaatccgcgttggcctggtgggctatggttacgccagcaagacttttcatgctccgctgatcgcaggaacccctggcatggttttggccgcagtttccagcagtgacgccggtaaagtccacgccgactggccgatgatgacggtggtcagcgacccgcaggcgctgttcaacgacccctcgattgacctgattgtcattccaacaccgaacgatacccacttcccattggcacaacaggcgatggcggcgggcaagcatatggtggtggacaaaccgtttaccgtgacactgtcacaggcgcagcagctacaacagcaggcagagcagagtggacaactgctttcggtattccacaaccgccgctgggacagcgatttcctgaccttaaaagccttgctgaaagacggcgctttaggggaagtggtctattttgaatcccatttcgatcgtttccgcccggaagtccgccaacgctggcgtgagcaaggtggggctggcagtggcatttggtacgatctggggccgcatctgatcgaccaggcgttgcagctgtttggcaagccacaaacgctgtttgtcgatctgggcgagctacgcccgggttcacaatcggtagattatttccatgcggtgctcaattacggccatcggcgtgtggtgctgcatggcacggtgctggccgcggcagaaactgcacgttacattgtgcacggtacacagggcagctttatcaagtatggtctggatccgcaggaagatcgcctgaaagccggtgagcgtttgccgcaggccgactggggttacgatatgcgcgacggagtagtgacgttgtcatgtaacggcatgctggcggaacagccgctgttgaccattccgggcaattacccagcctattacgccgccattcgcgacgcgatttccggtgcaggtaccaaccctgttccggcaagcgaggcgatacaggtcatggaaatgatcgagctgggcattgagtcggcgaaacagcaaaaagcgctacctgtcagctaatagcaataataacagtagggttcagagcgcttctgaacccttttttacgcattaaatagcaaggaattgtgcaggatgtcctggttacaacgtctacgtatcgacaagtttttactggtactgctgatggtggtgctgttggcctcattgctaccctgcgaagggatttggcagaccttctttgaacatttaaccaccgccgcgatagccctgttgttcttcatgcatggggcgaaactctcccgtgaggcgatcgttgctggcatgagccactggaaactgcacctggtggtgtttctcagtacctttgcgctcttcccgctactagggttgtcgatgaacctgctggtgccgggcataatgacgcccaccgtttatctgggtttcctctatctttgtgctttgcctgccacggttcaatcggcaatcgctttcacctccgcagcaggcgggaacgtggcggcggcgatctgcagcgcttcggcatccagcattcttggggtattcctgtctccgctgctggtgggggcattgatgcatacacaaggaggcaatactgacgtattgcatgccatcggctcgattattctgcagctgatggtgccttttgttattggccatctggcacgtccgctgattggcaaatggatcgatcgccatcgcaaactgattaacctcaccgatcgttcctcgatcttgctagtggtctataccgcgttcagcgcggcggtggttgaggggatttggcacaccattgatggctggtcgctgctgacgatcctggtgatgtcgctggtgctgttggcggtggtactgattatcaacacctatgccgcacgttggctgggctttgatacagccgatgagatcactatcgtattttgcggttcgaaaaagagcctggccaacggcattccgatggccaacgtgctatttccagccgctgccgttggggcaatggtattacccttgatgatcttccatcaggtacagttgatggtatgtgcggtgctggcacagcgctatgcgcgtaaaacagcccagcagcgcgaagttgccgtaactaaataaaaaacagggatacagcatgaccaaggtagtcgaaattttgcaatatcgtttacaagcgggcagtggcgagcgttttcaccacatcatgcagcatgatagcgtgccgctgcatcaggccgcagggatcaccgtgcttgagtacggtgtttcacttcacgatcccgatgcctattacctgctgcggcggtttgatggcatggtggaaatggaacaggtattgcaggccttctaccgcagccaagcctggttggaggggccacgaaccgagattgtgaccctgattgaagagagtcaccgggtggtactgccatatcaatcttgaaaaacaggctcagccttaacagtggctgagcctggatattgccttagccaagcactttagcgcgtagcgcctgtttttcctgctcgctgaggaacgccattttcaggccgttttcctgcgcggtgcggatttcctgcggggttaatccggcttgtggagccgccacgcggtattcatgctcaatctcgatgccttgcacggccggatcgtcggtattgattgaggccagcacgccgtggcgtaggaaggtggccagtgggtgctgtgccagtgaagacacggtgctggtttgtatattcgaggtcaggcacgattcaaccccgatggcatgctgcgccaggtaatccatcagtgccggatcttccactgcttttaccccatggccgatgcgctctgcacccaattcacggatcgcctgccagatgctttctgggccagcggcttcaccggcatgaacggtaatgcgcaggcctgcgtcacgagcacggttgaaatggttgaggaacaggctgccagggaagcccagctcatcaccagccagatccaacgcggtaatgccgtcgcggtgggccagcaaagcgtctagctcttgcaggcaggcggcttcgccgaaggtacggctcatgataccaatcaggcgcacgtcaagatcgcggtcgcggcaaccagagcgaatgccgtcaattaccgcttccaccacgccagccaccggtagctggtgcttcatcgccatgtagtaaggggagaaacgcagctcggcgtagtgcaacccagcgtttgccgcatcttccacgttttcataggccacgcgacggcaggcgtccagatcgcccagtaccgccacaccccagtccagcttttgcaaaaagctcatcagatcgggttcggtatgggtgatttgcacatggggaagcagggcagccagctcgttggcgggcagggctagattgaactggcgccccagctcaagaatggtttgcgcgcggatgttaccgtccagatgacggtgaatatcggtaaggggcaagcgggagtcaatcatggcggcactcattatttttgtataggtaaagtgcagatcagtataaaaacaaacgaatgaaaatagccatatcgttgcatgaaaaagtgactcaaatcacattaaactgcgataccgatcgcagtttagggcaaagctaagtcaccttgggctaggtgtgttttggagaagtgcagtcagaccataaaccaggggcactcggcccctggcgatatagcctattttgcgtccaggacaaattgtaacgcggcgatcagcttatccatcccagcttcaaccttgctgcgtgggcagccgacgttcaagcgcaggaaaccacggccctcttcgccataggtaaagccgggcatgatggcgactttctcacgttcgatcagcacctgctgcaattcgcggtcgtcaatgcccaacgggcgtatatcgatccacgccagataggtggcctgcggtggctgccagtttagctgtggcaatgcctggttgagccgttcggccacgtaggtcaggttatcttgcagatagtcgcgcagcgcgtctagccaaggctcgccgtggcgataggcggcaatatgggctgccaccgccagcaccgcaggtgaggataatccatcgcggctttttagtgcctgaacgtagctatcccgcgcgctatcatcgctgataaagccataggctccagtgagcgccggaatgttgaaggttttagagccggaagtcagcaatgcccacggggttgtagccacttggctccatggcgtatgacgatgttccccccaaaccatatccatatggatctcatcgctgatcaccttcacgtcatggcgttcgcacagctctgccatctgctccagctcttgctgtgtccacaccttgccggtggggttttgcgggctgcacaacagcaggatcttggtttgcggccgggccagcagggcttccagatgcgccatgtcgcattgccaatcattatccactttgtgcagcgggcaaggtaacacctggcgctgattacccaggatcaccttatagaacgcatcataggctggcgtatgggtgaccacatattctcccggagccgaccagatacgcaccagctgtgccaccatgtaaatcaccgaagggccatagaccgccttggtcgtatcgatgggggcattgaagcgttgttgataccaatgccgcaccgcgccaagaaagtcttcatgctgccagcggctgtagcccaacacgccgtgttgcaggcgcttttccagggcttcaagaatgcagggggcggtggcgaaatccatatcggagatggtgaaaggcagcagatctgcggtgccaaaccggtcggcgatgtagtcccactgggtgcaccaggtaccgtgacgatctaccggggtagaaaaatcaaacatgtgaaactccgaacaagggcgcagcaggctgcgcccggggggaaggttatgcgttggccatcagtgattctaactcatctttcaccgattgcacctgcgggccaatgaccacttgcaggttgtggtcattaaggtgcaccacgccgatagcccggttggctttcagcactgcatcatccaccttgctcatatcgttaactgacatacgcaggcgggtaatgcagttatccagcgaaacaatattctctttaccgcccaacgccgccaggatagcaggcacgttatagccggatttacccacggcaccgacaggggcgctctgtgtagcggtggtttccgtctcacggcccggcgttttaatgttccagcgctggatggcgaagcggaagatcgcatagtaggcaacgaaccagatggcggctaccaacggcaccagataccacttggttgcggtgccgtgcaggatgccaaacaccacgaagtcgataatgttgccgtcggtgttaccgatagtgacgcccagcaaggccatcacggtgaagcccagaccggtcaggatcgcgtggatcaggtacaggaacggcgccacaaacaggaacaggaattcgatcggctcggtggtaccgccgacgacacatgccactacaccggaaatcagcagccctttgatcttgtggcggttctccggcttggcacagtggtacatggctaacgccgcacccggcaggccgcctaggaaggcaggcattttaccctgggacaggaagcgggtagcgctttcggcaaagccgtgggtggttgggcaagagagctgcgcctggaagatggtcaatgcaccgctgacttcacggccacaaacgtccagcgtgccacccgcttcggtaaagcggatcagagcgaccagaatgtggtgcagcccgaatggtagcagcagacgttcgccggagccgaaaatcatcggtccaaacatgcctgcaccgttaatcatacggcccaacccgttaataccggcagcgaaccaaggccagatcagcgggataatcagaccgcacaggcccagtaccacggtggtgacgattgggacaaaacgagtaccgccgaagaaggccagcgcatccggcaggcggatggtgttgaaacgctcgtgcagcagataaacgatgatcccgacgatcaccgcgccgaggataccggtatcgatagactgaatgcccaggatgttctggatgttattggctttcagcaccagcggatcgacggtaggcagcacgcctgacgtggtcaggtagaagttggtcgccaggttcagcacggcaaagccgacaaacccagagaaggcggccacgcctttgttctcacgcgccatgcccaaaggaatggcaatggcgaacatcaccggtaggaagctgaaagcaaaggagccgatcttgctcatccaggtgaacagcagttggaaagccggatgaccaatgaaaggcagcaacgtgatcacgtcacggctgcttagtgagctaccgatccccagcatgatgccgcagaatgaaagcagtgcgacgggcagcataaatgtcttgcccaggctttggaaaaactcccaaagcgtaattttttgttttttagacgctggcataaccgacgactcctggcgaaaaagcatgcaatgttgtgtgtacccgattaggtaaaaataagataaaacgttttacctagtaaaaatgcgtccctaatcacaattatgaacggtgctttgcggtgacaatgcttatgtgggtaaatcgttttactgcattgagagattcggtataccatttgctatcagggtgaaactcgccctgatagggcattgcagaggttattaccatcaaaaagatcactatcactgacgtcgcacagttggcaggcgtatccgtgaccaccgtttctctggtgctgagcggtaaagggcgtatttcacccaccaccatgacccgtgtgaatcaggcgatcgagcagcttggctatgtgcgtaaccgccaggccgctacgctgcgcggtggcgaatcgggggtggtagggctgatcctgcgtgatatctgcgaaccgttttatgccgagatgaccgccggggtgagtgaggtactggaagccaatggcaaagtgctgtttctgacccaaagcgggcgcgaaggcaaagggctgatgcgctgttttgatatgcttctggagcatggcgttgacggcatggtgttagcgggtggggtacgtaccgcgaaagggctgaaagagaaagccgaagctcagggggtgccactggtgtgtgccgcgcgctccaatgggctggaaggtgtagacgtggtgcggcccgataatatgcaggccgcgaaaatggccaccgaatttctgatcaaacgggggcatagccagattgcttaccttggtggacaaagcgattcgctcacgcgggccgaacgtctggggggattctgtgccaccctggtgcaatacggcctgccattccgctcagaatggatcgtcgaatgcgattgtcatcaacgggcggcggctgaagctgccgaaaatctgttgcgtcagcatcccaatatcagtgcgttggtgtgccataaggcctcggtggcgttgggtgcctattttggtatcgtgcgcagtggccgtagtattggctcggaagggatggacagcttttatggtcaacaggtggcgctgatcggttttggcgatgtgccggaggccgaactgactgaacccccgctgacctttatctccagctcggctcgtgaggttggacgcagtgctgccctgcggttgttgcaacgtattggcgatgattcattggcgccgcagaatgtgatcctgtccccagagctgatcaagcgcggatcggcctgatccgtagctaaatctctaatcttgccgttgttccaatattataaattctcaggtgtctctaaacagccttgctctgatgccgattaaattaaagcgaaatttttgatataaccgacacgatatgagatttaatttgggagctgctgtgaacagatatgggatatttggttgctgcatggtgagcttcctgatcgttttttcgctgattcggttatctgaatttgaactttccgatgatgatcaccaacgaactatcagatttgagcatcatcaggacgttctggaaggtacattaatccttcctcctgggaagatatcgccaccgcttatcctgctggtacatggtgatggcgctcaagatcgttggtctgaaggcggctatattccgttggtgaagttcctggttgcccaggggatcgcggtttattcatgggataaacccggcgttggggcaagtagtggtaactggctggcacaaaccctgccggaccgcgcagatgaagcggcatcggctctgataaaactgaaacaggaaccggagtttaagcacagtaatataggctttcttggcttttctcaggcgggttgggtcgtgccaaaggccagccaacgggtaaaaaccgactttgttattctggtgggcgcggcgataaattggcgagctcaggggatttattatacggggcaacgtctgcaatctgagggcctgtcagctgaaaatatcgtgaaggcgcaagcacacgaagctgccgcttttgacagtcagtttacgcaggaggaagccgcatctccctgtatttctcgttgtacccggcaggactttgagcgtcgaaactcacaggccgatgcaaggaaagatatttcagcgatgcaaacgccggtaatgatcctgatgggggcggatgatcgcaatgtcgatcctcacgaaacgaccgctgtctggagcgaagaactcccggccaaaacacctcgctgcatcagactgatcgctgatgctacccatgggcttttgcggagcgaatggtttgactaccagctatcctcgcagtggccttggtggaagcaaggtggatttctgttgtctgggcagcatgcttactcgccgggttcactaagggctatttcagactggatacttagtcagcaatgtcatgagtgaaccgcattctgaagccacgctgaaaacaaaaaaatgaaagactttggcccggctttcgcagcctccgaggcgttcaatacccagaagctcaagcgcggatcggcttgatctgccgctcgcgtttttcccgcataaaatcgatgaaggcgcgcagcttgagcggcatatggcggcccgctggaaagtagataaagaaccccggcgcgacgttgctaaaatcctgcagaacctctcgcagttgtccgctctgcaactcttggtgtacggcagctcgaaagcgttgagtgagccctaatcccgctatcgccgcgtctttaagcagctggttttcattgaagatcagccgcccattgacctccagcgtcaactgctcagtcccgttgctgaaataccagggttccagtttgccactgccgggaaagcggtagcgcatgcagtcatgctgctgtaactcctgtggcgtttcgggctgaccgtgttgtgccagatagcccggagaagccacgatcacatgttgttggccttggtcgatagggacggccaccatgtctttttgcaacatgcgctgcatgcggatgcccgcatcaaaattatccagcaccagatcggcaaaacgatcgtcggtaaacagctccagcttaagttcaggatagcgcgcatggaactccggcagatagggcatgaccagcatcgacgcggccaactgcggcaaggtaatacgtaataagccgcttggctcaccacgttgactgctggcattttctgccgcgacctcaatctggcccatagcgggagcgattttttcataaaatgccagcccttcatcgcttaacctgactgaacggctggtgcgattgaacaggcgtactcccagaagggcctctagcgcgcggacattttgtgaaaccgcaggcggtgtgacgccaagatgattggccgcctgggtaaaactgcccaatttggcaacggcgtcgaaaaacggcagtaattgcagcagtgagctcatctatcgataatcccaacttaatgattcattaaattttagcctatttaatttaatgatcaaaaccgtagactggcctgattaccttaagaggatcacagttatggttcaggcattgacacaacggatagaggcagtcaatcagcaggcgatcgccgaagggcggatcgtgggtagcgtggtgctggtggctcaacaggggatggtgatttacgcaggtgccagcggctatgccgatcgcgatcagcggaaactcatgcagcgaaatagccaattccggctatcttcggtctctaaaccctacatcacgctggcagcgatgcgcatgatagagcagcaactgctaagtctggatgatgccgttagccgttggctaccctggtttactccggcgttgccggatggacgacggccagcgatcgctattcgccacctgttaacccacactgccgggttggattaccggttcaagcagccagaaggcgggatctaccagcggttggggatccacgacggcatggagatatcctcgttaacgctggagcaaaatctccatcggctggcgcaggcgccgttgcaggcagaaccgggtagcgaattcagttactcattggcaattgacgtattgggagcggtactggagcaggtggctggtatgcctttgccacagctattcgagcgttgggttggccaaccgctagggctggggaataccggtttttatacgttgaacgccgataagctggcaacggcctattacaacgctgaaccgcaaccggcagcgatgtatgacggttttctgctgaggcttcctgaggagtttggttttgacgtggagttttcgccttcgcgagcgcttgaccgccacgcttatccttcggctggtgcggggatggttggtgatgctgatgatgcgttgcgcctggtggagacgctgcgtaatggtggcgacggagttttgcagccagaaaccgccgcattgatgcgtcaatcccatgtcggagcacaggaagaaattcaggggccgggttggggctttggttttggtggcgcggtgctggtggatgccgcattggcagcaacgccgcagcataatggcactatgcagtggggcggcgtgtatgggcacagctggttttacgatccggtcgcagagttgagcgtggtggcattgaccaacaccgcgattgagggaatgagcggtttatatcccgtgcagatccgcgatgcggtttatggttaataaaaaaggggccagatatcacctgaccccagaaggtttttattgcccttgcagagtgggttgctctggtgccggagcggcatcctgctgatcgggctctggagcactatcttcttctggtgcggaaccgccgcccagcatcccgaacatacccacgaactcctgcagcgacattttgctgccgttcagctcaatctggttatcggcatacttgaagctgctgccaatcacgttatctttcagcgtggtgatcttgaacatctcgcccatcgccgccaggcttttcacctgctgttcggcctgctgctgtgcttgttgcgcactggcaccttgcagctgtgccgcctgagccatggtttcctgcgccatagcgaccggaatagtcaactgcgcgtcgattttcttgaccgaacgggcaagctgctgatccggggattcggcagcagcgccagcctgtgcgggatccagcagatcgaggttaagggtaaaggcgctttcacccttggtgtttttccagctcagcggtgcgatgctgatggttgggttgcctttcagcaacagtggcaggttttgcaccagcatctcagccgtttgctgctggtaggcttctggcgacaacgtttcggcctgctgcagcaaggccatggcctgctgattgtaacgatcggcaaactctttcagccctttaccgtccaggttgtcgattttcagcagcagttttcctgcaccaaaatcggtaccctgaattttcaacgccgccatggtgtaatccagttggcctgcgaggctgttgcctttctcgccgaactggctggccaggttgaagccttccatcgtcactgcgtctttaccgtcgacagccacggtcagttgcttcatgcccagcgcttgctcacccaggctcagactgtactggcccaggtgggtgttgcttttgagcgtcagcccttgcatcgtcatctgttcgttctggccggactgatttgggccgctgatcaccaggctgtcactgctggcatccaggacagcggtttgcatatccttgccgacatccgcgtcaatttttgcaccgctgaatttcagtgaggacttgtctttctggtactccaccgggatcacatcgatagagctggcgacatcgccgctgtaggcaatgcgtgaatcggcgctgaacagcgacttacctttggtgatttcaaacagggttttgacttttggcgtgttttccagctcggtatggaccgaagccatgcttgggatcaggttgaattttttcaactgggccagcgggaatgggccgtgatcgacggtttcaatgaaggccacttcttcgccggacttcagcagggcatcgtcggtggtgatgctaccatcggcacgcagcacaaaacgggcttggctgctgaaaatcccgcgttggtagttttcataactcatcttgaccccagccttcggcagtatgcttttcagctggctattggcggtgtcgaccatttcccccatccgttgctcgataagcttgccggtgtaccaagaggctccagtccatgctgcgccgagcactacaatgacgctgacagcgactaacgattttttcatagttctgttattcctttgttaagccggtagagggcagggcaaccaattgggcctgcaaaaaaacgcctgaaggcgttttattgtgtaggtaaactaatcatcttagcaacttatttacctatattttaccgtcaattaggacaactgattataaacgcgggcgatacggccgctcccggtgacgttaaccggggattcgaaggcagcaataaagcaggattcacctggctgcaagatgacctgctggccctgtttctccagcgctgcttcaccttctacgcagaacacgatcgccgcgctgttttgcgccagtggctgcggtgtggcatcgagatcgtgtaacgagaaggcaaagtcctcaacggggatcgggaagaaaagctctttgccacgttgctctggctgagtcagcaggccagatgccggttgcggacggaactgcaggttggccaacagttcaggaatatcgatgaattttggtgtcagacccgcgcgtagcacgttatccgagtttgccatcacttccagcgcgacgccgttcagataggcatgtggggtctcggcatacaggaacatggcttcacctggtgccagtttgaccacgttcaacagcagcggagagaacaggccgctgtcgtcggcatagaaacgagcgataaagcggatagtgtcccaaggctcaccctgctggttgttcaaggcggccttcagcacgccaagcgccagcgttttttgctcaccgctcattcccagcaggctggcaaacagggtcgccagatgggcggtatccggctgctgcaggaaggcggcgatatcgtgatgtgcgccagaaagagggtgtaacagcgcaacgatatcgtccagttcgcgaaagccattcattgccaggaacggcgtcagggcaaacaccagctccggcttgtgattcggatccttatagttgcgctcagcggcatcaaacggaataccagcggcattttctttggcaaagcccacctctgcggcactcttgctcgggtggacctggatggagagcggctggtcggcacacagcaccttaaacaggaacggcaattcaccaaagcgttgtgccacttcggcacccagctgtttcggctggtcggtatcaatcacctcacgcagagagcgcaggttccccgcctgatcggcgacctgtgagctgcttttagggtgggcacccatccacagttccgccattggcttgcctgtcgggttggcaatgccatatagcttggttaacgcatcaacgctgccccaggcgtagttttggatggcatttgtcattttttgcatgatcgtatccctgctttctcaagaaaattgcgctaagtaaacaatgtggcgcaggcgcatgcaagccaagatggctaaaaatgctctttgctctggacgttaatgcgaatagttattatctgtctatactgaggtggctcgccaacgggttgtcactcgttggcatttccccttcattttaggaattgtgctaaggagacagtgatggcaggcgttcggattgaaaaagactcaatgggccccatcgaagtacccgccgaccaactatggggcgcgcagactcagcgttcgttggaacatttccgtatctcgtcagaaaaaatgcccccggcgctgatccatgcgttggcgatgaccaagcgtgcggcagccagcgtcaatatggatctggggttgctgccagcagagcggggcaaggcgattatccaggctgccgatgaagtgctggcggataggcaccccaatgaattcccattgtcgatctggcaaaccggttccggcacccagaccaacatgaacatgaacgaagtgctggccaaccgtgccagcgagttgctggggggcgaacgcggtgaagcgcggcgagtgcatcctaacgacgacgtcaacaaaagccagagttccaacgacgttttccctaccgcaatgcatgtggcagcggtgatcgcggtacgtgagcatctgatccctgagctgaaggcgctgcaccgcacgctgcatgccaaggcggaagctttccacgatatcgttaaaatcggccgcacccatctgcaagatgctacaccgctgacgctaggccaggaaatctccggctgggcggcgatgttggaatataacctcaaacatatcgaagccagcatcccacatctcagtgagttggccttgggggggacggcggtggggaccgggctgaatactcatcccgaatacgcggtgcgtgtggcgaaggcgctggcagaactgaccgggcagccttttgtcaccgcgccgaacaagtttgaagccctggcaacctgcgatgcgctggtacatggccacggtgccttgaagggattggccgcctcgttgatgaagatcgccaacgatgtgcgctggctggcctctggcccacgctgcggcatcggtgaaatttctatcccagaaaacgagccgggcagctcaatcatgccggggaaggtcaatccaacgcagtgtgaagccatgaccatgctctgcgcgcaagtgatgggcaacgacgtggcagtgaatattggcggcgcgtccggtaactttgagctgaacgtattccgcccgatggttattcacaactatctgcaatctattcgtttgctggcagatgggatgagcggcttcaatgagcactgtgcggtggggattgaaccaaaccgcgaacgcatcggccagttgcttaacgagtcgctgatgttggttaccgccttgaatacccatatcggttatgacaaggcggcggaaatcgccaaaaaggcccacaaggaaggattgacgctgaaagcctcggcgctgaagttgggctatctgaccgagcagcagtttgacgaatgggtgcggccagaggagatggtcggcagcatggggaaataacgccaaaggccaggcgctgtgatagcgcctggcaatgcggctcaccccttcagcaatgaaaccaacgcccacggatccgcacgctgggtataatccgggttaacttctgcataaatgatgtcaccgccaggcgcgataacgaagcgggcaggcatcggcaatgtccaaccactttcgtcgttaagcttggtcaggtcgatacccaagctgttgatgtacagctcgacaagatcatccgtcaacgagaaacgtaaaccaaactgtgctgccaggctattgccgctatccgtcagtaaaggaaacgttaagccatgcgcttgctgcatttgctggccgttaaccggcaactgtggcgagatggccaccaggttggcacggtcacgcaactcgggcagaacggcctgcagtgcctggaggtccatattgcagtatgggcaccatcctccccgatagaaactgacgaccagcggcccttgtgccagcaattgctgggaagagactgggttaccctgggtatccggcaaagtaaactcaggggcgcgatcaccgaccgacaaggcgttgttggccatttctgtactgataagctcgtcgataccctgacgcaagagttcatgatccgagggcgcaagcttgaagggcagttggcctgcttcaaaagcggccttgaatgcgtcgagctgatcctgaagtttcatgttgttccttaagataacgaatggacagcaaccagtttgcctattgtcgttgtatgggggtagagtgcggtgatcactaatggttattccaacggggaatggcaggatggacaagctaggcgactatgctacctatatcagcgtgtttgaggcgggatcgttttccgttgcggcccggcggcttaacgtcggtcaaccggcggtatccaaggcgattgtccggttggaacaacagctgaatacacgcttgctactccgctctactcacggtttaaggccgacggaagctgggcaacagctctatctgcgggccaagcatatcttgcatgaggtcgcggaaaccgaatcggccgtgtcaggcgtggccgaggtattaaccggtcggttgcgggtcgcttcgtctgcggtgttttcccgcctgattgaactgccggacttgagccagtttctacacgacaacccggagttggcaatggatctgctgcttgatgagggcgagttgggattgatcgccgaggggatcgatatcgctttgcgtgttggtgatttacccgattctgcttttaccgcccgcaaattgggttcagcaacgcaacgcgttatcggggccccggcgtattttgccagagcagggatgccccaaatgccccgggaattgctacagcatgatatggtgatccatcaccgtgttggtggcgctgagaagtggctgttcacccatgaacaacaacagcaacaggtccgattgcagggccgggtgcgcgtgagtgctaccgaatgcttacgtgaaatggtggtggctggttttggtgcgacggtagcctgtgaagggctgtttcgtagtgaattgcgtgagggcaaggtggttgccgtcttgccgcaatggcagttaccaccgttggcgctgtgggcggtgtttcccagtgggcacttcatctcggccaaggcccgtgcctttgccgactttattcaacaactgctgcaacgagagtaacccatgtcccgcactcaacgcctgctcgatctgatgcagatcctgcgccgccatcgttacccggtcgccgggcattccctggccgaagaactggggatcagcatgcgcacgttataccgtgatatcgccaccttgcagcagcagggggcggatattgttggtgaagtggggatcggttatgtattacggccgggatttatgctgccgccgctgatgttctcgcaaactgagatcgaggcgctggttctggggatgcgctgggtggaacgccggggtgatagccaacttgccggggcggcgaccaatgcgttggcaaaaattgccgccgtgttgcctgcggaactgcgtgaagagctggatgccaatacgctgctgatcggcccggtgcctactgcctatgtggcggatgagaccctggtgacgatccgtgaagccatccgtttagagcgtaaaatcaaggtggagtatcgggattatgccggtaatggcagcgagcgtatcttgtggccgtttgccatgggctactttgaacaggtgcagatcctgatggcctggtgcgaattgcgtggctcgatacgccatttccgccttgaccgtattggccgcttaacgctgttggagctacgttacccgcgtggccgccgggcattgatgaagctgtggcgggaaagtgagggcattgcccaatgaccctactgccataaactgacagtagggtgcactagagtgacgttatcaggagccagccggttcccatccagaggataacataatgactaccccaagcatgaccatgatttatgtcgatagcccagccaaaagcgccgaattttatcgccagttgttgggagccgaacctgtcgagcagtctcccacctttgccttatttatcttgagtaatggtttcaagctgggcatgtggtcaaaacataccgtagagcctgctgcaacggcgaccggtggcggtacagagatctgttttatgtgcgaacaaccgcaacaggtcgatgcgctctatcaacagtggcgggataaaggattaactatcgtgcaatctccggtcgagctggacttcggctacacctttgttgccgccgatcccgatggtcatcggctgcgtgtttacaagcttaacgacgagtaattactttcgcagctcgatttgacgtgcaggggcacacatactgtgcccgttcaaccaaataccctgataaaccgatttacgtccgttaattatccctcaatatcggtatacagatgcaggcgttttaccagcaggcgcaagggtttagcctccggcttatatttgtgttttaccgctaccacgtcgtaattgagcagttcaccgatctttggcacctgtgcacccatctctggttggcacaaggctatcagcggtagcgggcaggggtgttgcacctgcttttgctgcggttgataccatacgcgcgctatgggttgcactttcactggccgttttatttttagcgtcgtgttctgcggcaggcggctgacgtcatctatttcacggctgaccagttccgcccattgttcgcggttgaagggcggaacggcgcgcccggctttcaggcttttctccagctgcaccaagatatcatcgcgcttcaccttcttgatgatgtgcttgttggcccagccaaaacgcaccgagtccgggttggtgagcagggtaatggagcgataggcgctgagggtgatcaaaccatgcaggtgggtatgcacaaactcaaagcgttgctcaggtgccaggccagattccacggtaatgatatgttccagttctgccttaagccggttgatcagggcgatctgctgttgtagcgccagatactcggctctttcggtctcaaggcaaatgacaccgggtaatcttaccgccgccttgctgctgatatgctggcggttgtggtggataaacagccgttggtagtgttccatggcaaggtcacgtgcagcctggcctacatgctgctcaacgctgatctgttcgatagcggtatgctccttacctttttcaatttctggcaggctgaatacccttgctgccagcaacctcaacggctggatttgctggtggagttgcgccagcgcctgttccagctcgctaaaacgcgcattcattctgccgatcaggctgtacttatccatcattacctcgcactttagttacaacatccattgtagggcagtgtaaccaaggtggcaacttcggccacatcatcatcattaaccacgagtgaaccaagctaagcagggaggtaatgtgacccctcccagagcggaaggggtctggaggctagctacgcgcagcttccggcaatttcttcaggtaatggccaaccagcagggccagcaacagcatcacgctgataaaagcgactacgccgctccagccaaagttatgccagaacacgccgcccaacgtcccggcaacactggaaccaacgtaataacagaacagatagagcgaagaagcctggcctttggcgcggcgtgcgcggcggccaatccaactgctggcaaccgagtgggcggcaaagaaaccggcggtgaacagcatcatgccaataaagatcactgtgacaggggccagggcggtgatcagtattccgatcagcataatgataatggacgctagcagcaccgggccgcggccaaatttggaggtcagggcacccgctttgggtgaactgtatgaaccggtgagatacaccactgacaacaggcccacaatggcctggctaagatgataaggatcgctcagcaggcggtagccaatgtagttgaacatcgtcacaaagctgcccatcagcaggaaaccttcggcaaacagcagcggcagccccttgtcgtgccaatgcagcttaaagttaatcagcaacgttctaggccgcaatgaactggcgcggaagtgcttggacgctggcagaatgcgccagaacatgcaggctgctgccagggcaaacaccccaatcaccgccagcgagatccgccaggagaagaaatcggtgagcaccccggttaccaggcggccactcatcccaccgatcgagttgccgctgatatagaggcccatagaaaaggccacgaagctggggtggatctcttcgctcaggtaggtcataccgactgccgcaaccccgctcagcgaaagcccaatcagcgcccgcatcagcaagatgccgtgccaactggtcataaaggcacagatcagcgtacagatcgccgccaacagcagggccaccaccatcaccgacttgcggccgatagcatcggacagcgggccggtaaacatcagaccgatggccaacagcccagtggaaaaggagagggaaaggctgctctcggctggggagatgccaaaatcttgcgaaagcaccggcaagatcggttgcacacagtacagtaacgcaaaggtagccagcccggcagagaacagcgccaaggtcacgcgcataaactgcggtgtaccgcgttcgatgtaggggagtttattcaacgtggtgcgtttggttgttggggcactgtcaggggcaggcagcgtttttggcatactggccgcagaacgcgaagcggttgtcacagcggttccttaccgggttcgggagataaaaaatacgtcttgagtcacaaaatcatagggagcggccagttttttgtctaatatattaatcatcctaattaagatgtttaaagtatgaatatcgagctcagacatttgcgttactttgtcgccgtcgccgaagagctgcattttggccgggcggcggagcggctacggatttcccagccgcccctaagccaacagatccaagcactggaggatatggtgggtgcgcgtttgctggcgcgcaataaccgtaacgtcagcctgacccaggcgggtgagatgttcttgaaagaagcctatcaggtgcttgcccaggtcaaccgggctgcagagaaggcggcccgcctggagcgtggcgaactgggtgagctgacgattggttttacctcctcggctccttttatcagcgtggtttcccgtagcttgcgggcctttcgccagttatcaccggatgtgcatatcaaaatgcgcgaggtgaacaccaagcaacagcttgagccgctgctcaacggagaactggatctgggtgtgatgcgcaatacccgcctgccggatgcgctgcaacatcagctgttattacgcgagcccttgcttgccgtggtgccgaatggtcacccgttaacccttaaggttccaggcacgctacgtttcagcgatttggcccaggaacccttcgtgttcttttcccgtgaagtgggcactgcgctgtatgacgaaattctggctttgctggccaatgctggtatcgccccttacatcacgcaagaagtgggggaagcgatgactattatcggtctggtcgctgccgggttagggatttccattttgccgatgtcatttggcagagtgaagatcgatggggtgacctatctccctttggccgagccggaggcgatgaccgaggtctggttggtgcaccatcgtagcaggccgttaacggcagcggccaaggcgttaatggcgctgatgctcaagcccaaagctgtgtaaataagaggcgtttttgacggaaagctcggtgaatttgtgctgttaatcacataacgaatcaaatagttgacgctgtattccaaaagccccaccatagcctctaatctttatttagaagcgcgaaaaatagtaggagcgggtgtgtgattgctgatgggcagcctgggcatattgatcagatcaagcaaaccaatgcaggggcagtttaccggctgatagatcggctggggccgatttcgcgcatcgaattatccaagcgggcacagctggcacctgccagtatcaccaagatagtgcgtgaactgctcgaagcgcatctggttaaagaaaccgaatatcaggaagtgggcagccgtggccgaccggccgttggcctggtgctggacaccgaagcctggcattacctctctgcacgtatcagccgtggcaccattaccttggcgctgcgcgatctcagcagcaagatggtggttgaagaactgctgccgttaaaagccgaacatgccgagccgttattacagcgcattgtcagcgaagtagaccagttctttatccgccaccaaagcaaactcgagcgtttaaccgccattgccatcacgctgcccggcatgattgataccgctgcgggtattgttcaccgcatgccgttttatgacgtcaatgaaatggcattggggccagcgttagaagcactgacgggcctaccggtttatgttcagcatgatatctgcgcctggacgatggcagaagcgctgtatggcgcatcccgtggtagccataacgtcattcaggtcgttatcgatcataacgtcggcgcaggggtgattactaacggacgcgtactgcatgcgggcagcagcagcgtggtggagatcggtcacacacaggtcgatccttacggtaagcgctgctattgcggcaaccacggttgcctggaaacggtcgccagcattgaaaacatgctggaaattgcccagcaacgtctgggaggctcgatgtcttccatgctgcatggcgcaccattgaccgtggaatcactgtgcgatgcggctttggctggcgatcagttagccaaagatattattcttggcgtcggacacagcgtcgggcgcatcgtggcgatcatggtcaacctgttcaacccggaaaaaatcctggtgggttcaccgttgaaccgtgccgcagaaattctgcatccggcgattgcttcctgcatccgtcagcaatccttgcctgcgtacagcgaacatgtgcaagttgaatccacccaattcttcaaccaaggcaccatgccgggtgctgcactggtgaaagaagccatgtataacggctctttgttggtgaagttgctacaaggttgatttagctgtcgtctttcacgctgtggcgtaaactgcccgggaattggatccaaaagctacacttccagcgtctccttggcggggatgcgtttttggccgatcctaagagcttcaaggaccaacgagaacgcaggagaaggctgtttgcgactgggataatacaggtagtagccagggaagggtttgcaccattgctccagcacacgaaccagattaccgtctttaatatgtgctccaaattcttcttctggcaaaaaagcaatcccgtgtcctgcgagcgccgcagcaacaatatgttcagagctattgaaaatgagctgtccgctgacgcggacattaagctccccctcatcttgatcaaaatcccagatagacaaccctccagacctgaccatccgttgatttatgcacctgtgttgcgtcaactcatgcggggtgttggggacaggaggtacgttttcgttccattggctttgatgccccttatcagagtttcttattctttaccgccaaaagattgagctacctcaagcccccgttgagttgcatcccctagacttttgccgtaggacgactctcgccgtgatttacggcgattttttaggttaacgaggcatttcaaggcaatctattcatgttaaagcgtttatttgttacaggcacggataccgacgtaggcaagactgtggtttctcgcggtttattgcaggctttcgctgcgcaaggtcgttcagtggcgggttataagcccattgcggctcgctgccaggaaaccagtgaaggcatccgcaatagagacgctttagttttacaggcctcttcctctgtgccgctgtcctatgacgaaatcaatccgatcacctgtctggatgaggtgttccatgctcatgcgacccaggatattgattacgggctgatgagccgtggtttgcaccatctcgccgccaaggcagatacagtcgtggtagagggcagcggcggctggcgggtattgatgaacgatctccgtccttatgccgaatgggtggtacaggaacaactgccggttatcctggtggtcgggatcaaactgggctgtgtcagccatgcgctattgaccgcacaggcaattattaacgatggcttaccattgctgggctgggtggctaatcgtatcaaccccggtttagcgcactacgcagaaactattgatgcgatgcagcagcgtattccggctccgttgctgggtgagatcccttatctgccgcgtgcggaacaacgtgagttggcacagtatctggatgtttcgcagttggttgaccgctacgtgttgtgataaaccgacagtgggcgtagcccgcgagcaatggtggtggcgataacgcaagccaacagaatgcctggcagcagggtatattccccggtcatctcaaacaccattaatgccgccataattggcgcatgagtggtggcagccagcaatgtcgccataccagtcagtgctagcagaatgggcactgcaatacccaactctggccatagaccaagcatctggcccactaccgagcccaatgcagcccccacgaataatgtcggcgtaaacacgccaccaggtgcacctgagccactgctggccaacagggctaacagtttgcaaatcaggatcgcactgaccagcagtatccccggtggggccgagagtaaagattgcaccacgctatagccatttccccagacttcgggatacaacaaggaaagcaacccgacgatcagcccgccaagagccagctgtaatggcggtatgaggttgagcgagcgaaatgctcggccgctggctgccatcgcccacagaaacagcgggccacaaactccagccagtatgcccactaaagccattaacagatactgcaccggccagggggcagcaagcggctccacgatatagagcggggcctggccaccgttcagcagattggtcattagcagcgcactcacggcggcgatcactactgggccaagcgaggccagcatcagtgaaccaaacaggatttccgcgataaacaggctacccgccaacggggcatgataggcgctagccatcccggctgcggcagcgcaagccacccacaatttccattctttcgccggggtaaagcgctgggaaaataccgaacccaccaatgcccccagcaggatcatcgccccctcgcggccaatggcactaccgctggaaaccaccaacagcgaggccaggcattttatcaggctggcgttaacggccaatcgtccgtcaccggcttcaatcgcttccatataatccgttggggcgatgggtttttgatgctggtaacgttggtaaatccacaacaaaaagccagcggctaatccacctaacgcgggcgttaacgctctccgccatccgggcagtgcagcagcagcggccaccaaactgccttcgtcgtgatccagcaacagccattcaagcccgagcatggcgcggtgaaataaccatacggccagcgcagcacaaatgccgagtaggatggcaatcaacagatggcgcagcagggcgcgatagtgatgcagagggaccagttgattcatgtgttggcagatgatgaagaataagaggttcaggtgggcattgtgcttgtctacccacctgaaaaccagagaatctttatcagaaccctggcgttgtggctaaagtattaaccggccggaggcgtggcaggctgatagttaccgctcatgctttccagcagcgcgaccagatccttgatatcgttgtccggcagggtaacgccgacctgataggtcagcatatccttgaccgcctgatgtagggaggtcacgctgccgtcatggaagtaaggggcggtttgggcgatgttacgtaacgtcggggttttgaagcggtgacgatcgccatcatttttagtgacgttgtaacggccaaggtcggcctcggtgaggttaccgcgagcggcaaagtaatccgctttcagccccatcacctcatacgattggccgccaaggttgaccccagtatggcaggtgccgcatttgttttgctggaacaactggtagccgtgtttttgttgcgccgtcagggcattgctatcgcccttaagatagcgatcaaacgggctatctggcgtgatcagtgtcttttcgaactcggcaatggcgtcggtaatgttttcgccggtgaagccgttagcatagacgcgccggaaatcggccttcagcaaggcgtcctgatccagtttagcgatgatttcatcccaggactcagaggccatctcgatcgggttcattggcgggccaccggcctgagcctgtaaatctgccgctcggccatcccagaattgcgccatattaaaggccgcattaaacaccgtcggggcgttgattggccccacctgatcgccaacccccaaagatgagacgcggccatccacgccaccttcgcccagcttatggcagtgagcacatgagatgctgttatctttcgacaggcgcggatcgtggaacaggcggaagcccagtgccactttctgcggatcggtaggtagcgaggcaggcaccggctgtaaggcggcaccacgcagttcagctggcgtatccggcaaagtgtagaactgctcgcgctgttgacggacccagctcagtagttcattgcgatcgccgtcgctgacgtttccggcccagtggaccatcttatacagtggaggtggcatctcctggttttgcagcacggcttccagcttggccagatcgacctcaggcaccgcggttttttgttgcagagcggagcgggtcgcatcgaggttgaaatgctgatttccacggaggatatcctgcgccataatttgtttggcgattggcaactcagcatagaagggaagttgagccgagttggagtggcaatagtcgcagccgttgcgggttaacagggtatcgatttgattgccagcaaccacggggtttcgctgttgatcgtaatggtagacataaccgacggtccccaaatagccgacgacggcggtaacggcacatcccagaatgatttttttaatcatgttctcgctccaatgagttgatttccaaatagccctacatataaagaggtaataaaatgggcaagtcagattgtcacgacctggggcggttggcaacttgattaaaatcaatcactatcattggtttgcactatcgttcggataggttttaacgataaagcaggcgtggcttgactttcaggtcgcttctaagaaataccttattattcaatagggtgtttatttatggatgataccgtcacaatgtgttcaattggtgcgttgttgcggttttttggtgcacaacatccccctgacaaactacagcgtcccccggctgttatactgcgggaaaataaaagatatagggacacatgataaactgatgaccactaacacttcttcgagcacagtccaagtagctcatcggccattgatcctgtttgcctgcatgctggcgatgttcatgtctgccatcgaagcgaccattgtcgccaccgcgatgccgacgattattggcgacctgggtggtttttcgttgctaggctgggtgttttcggtctatttgctggcacaggccattactatcccgatctacggacggttggcggatttatacggccggaaaccggtctttttctttggcgccacgctgttcctgttggggtcgatcctgtgcggtttctcatcgaatatgtattggctgattgccttccgcctgttgcaagggctgggggccggggcgatcatgccgattgccaccaccgtgatcggtgatatttatagcgccaccgaacggccaaaagtgatggggtatatctctagcgtctggggtgtttcggccattcttggtccgttactgggggcgtttatcgtgcaacacacgtcttgggcactggtattttgggttaacctgcccattggcctgctggcgatgtatttcctggggcgttacctgccagaccttaaacaggggcgcaaacatgcgttggatctggcgggaacggcttggctgacgatctttgtcgccgccttactgctgtcactcttgcaggcggaaatgctgggatggtgggtgataccgttgctggcgttggcgttagtggcgctgaagttgttaattcgtcaggagcgccgtacccctgaaccgctgttcccgctggccctgtggcaaaaccgcgtgattgtggcgggcaatattggcggcgtggtgatcggtgctgccatgatgggtattagcgccttcttgccgaccttcattcagggcgtgaagggcggaactccgctggaagccggtactacgttggccttgatgtcgattggctggccgctggccagtatgctgagcgggcgtttgatgttgctgacttcttatcgcaccacggcactgcttggcgcgttgctgttgtcggccggcggctttatcctgctgctgttacagccttccggtggtttgctgtgggggcgggttgctgcgtttatcatcggggttggtatggggttgtgcaataccacttttctggtctcggtacagaatgcggcacattacagcattcgtggcatcgcaaccgcctgcacagtattcaccaggatggtcggatcggccattggcaccgcgattctgggggctacgttgaatatcaacctgcatctgcgtctgccacaaacggttgatccagtacagcagttgatggagccagaagtacgcaacaccatgcgcccagaggcgctggcggatctcaccgggcatgtcgcagcctcaatgcattgggtattcctggtctcggcgttgatatcgatgtttgccttgggcgcggctatgctgatcccggcgcgtcatcggccacagggcgaaggtgaagaggttaaacaggcgtaacaaggaagaggggcgcagtaacgaactgcgccctggagccggttactgcgaggctttggtatcctggctggtgccagtttgcgccgcgtcaccgctgtcgtcgccgttattcaggcgggtatagacgattttctgcgtatcttggccacaatggccaaccaccagtccaccggcaaggttagcctgatcgttaggtacgatctccagcttaaagccggattccggcacgccgttattgacaatcttctgggcaatatccgcctttatgctctcacatgaggcaaaagcagccagcggcgcggtggctaacagcagtacacctactacgagcgcttttttcatcattggatccttatttgagacgaatgttctttgtcaggatagcagcatctggttgaatagtttacccttactcgctattactgcgtgactgggcgtccagtggtgcgatccagacacttacgggttgacggttcccaataggcattgacgttgtagctgttatcacaacgatcttcgtcatcaatagcacggtcaaccttgtcaaactctttctcgacacgggtgttgaccttgctgcgcagcgatttggtttcgttccactgctctttgctttggcgagcctgttcattgctcatggccgcgccgccgctgccgtcaaccgtgacgcaggtgctgccctgggtgcaagtggctgccaatgcaggagcttgccaggcaccggccagcaataacagggcaaccggtaacatcaggcgcggaagggaaggtaatttcatcgtttcatccttataagtgagtgttgcatccaccagcaacactggctgtagcatgggttaaatatatcactgtgctgttatattgcaccagcctgtagccaagttcgtttaatttactgagagaaagagcagcaatgttaaaaaccactttactgttttttgccacggcattggccgaaatcattggctgtttcttgccgtatctgtggctaaagaaaaacgccagcgtctggctgttgctgcctgcggccctcagcctgatgctgtttgtctggttgttgacgctgcatcctgcggccagtgggagagtctatgctgcctatggaggcgtctatgtagcaacggccctgctttggctgcgagtggttgatggtgtgaagttgtcgactatggattggttgggggccggggtggcactgctggggatgttgattatcgtttccggttggcgcacggcgtgagttgaaatagcagggcgggtgccctgccacagagtaggactgttaaccgcgatgaatgctcagcccggcaaaggactggctgaccggcatcatttccaaagtattgatattgacgcgggcaggcagcgttgccacccagaataccgcttcggcaacatcacccggcgtcagggcatctaccccttgataggttttatctaccttgccgtcatcccctttgaaacgcacgttggagaactcggtgccgccaaccatgccaggctcaatatcggtaacgcgaatatgagtgccgtgcagatcggcgcgtagacccaggctaaactgtttaacgaaggccttggtagcgccgtaaacgttaccaccggcataaggccagttggcggcggtggagccgatgttgatcacatggccaacgttacgttccaccatggctggcagtagcgcgcgggtcatattgaccaaccctttggtgttggtatcgatcatggtttcccaatcgtccgcattggctttgtgcgcaggttccaggcccaacgccagaccggcgttattcaccagtacatcgacgttgcgcagcgcagcgggtaactcttcgatggcctgctggatcgccgcacggttgcggacatccaaacgcacgatatgcagtgcttcaccgagttctgtctgcagcgcctccaggcgctctacacgacggccagtggcaatcacctgatggccttcaccgataaacttgcgggcaattgcttcaccaaaaccggaggtagcgcccgtgacaaaaataatcatgctgctgttccttaactgtttttagcctgcatccactctaacgcggttgcgttaaccctgcaattttaaccggtgatggccggcacgtggtaaaccacacagtcgtatttgatattctcgcggcggccttgcacggtgccacccagtgattcggcaatgcggcggcttggcgtgttctgctcggcgacggggtagatgaagtacggtgggtggtagcgctcgctggcccacttcgccatggcatggacgatttcgcggccatagccgttaccgtgcaggctctctttcacccagatcccgagttccggtttttgctggtgcagattatgcacgccacccatgccaacgaactgcttgctgtcacgcagtcgtgccacaaagatgacttcttcaccttcacggatcaacggtaaccagccttcccagacgttggcaaatgcctcgggagactcttctggttcaaaggtcataaaacgcgttagcgtaggggtgatcgcctggtaaacatcgtcggcgtctgctgcggtaaagggggcaatcaacaaccgatcggtatccacacggcactgagtaaggtcactgtgcatcattattattacctcgcttttcaggcctaaaacggcaaaaatccgctcccgttaaaacggggcggatcatcgatattacgttgattagcggcagatgcgacttatttttttaccaggtgaggggcaaggagcaaaaggtcggccgcagagagacgatccggcgcggttgaggcttggtgccagtagggataaatcagcggcggacggctcacttcttccaagcgctgcagctcttcttcgttgaggatcaggttggccgcgtgcaggttatctttgagctgctctgcgttgcgggcaccgatgaccaccgaagtgatcgttgggcgagccaacagccaggccagcgcgatttgtgccgcagagataccgcgggaatgagcgatatccaccagcacctcaacaatatcaaacagcgcgtcttgatcacgcaccggcggctcaccccagttggccagatggcgcgtgccttccggtgtgggttgattacggcggtatttacccgagagcaggccaccggccaatgggctccagaccaacactccaagcccctgatcctgagcaacaggcagcagttcatattccgcttcgcgcgcctgtaggctgtaatggatctgttggctgaccgggcgcaccaatcccaaccgttccgcgctgcccaggtgtttcatcaggtgccaaccggagaagtttgacaaaccggtgtaacgcaccttgccgctgctcaccagatcctccagcgcccgcagcgtttcgtccactggggtgatgccgtcccactcgtgcaactgatagagatcgagatagtcggtattcaggcgtttcaggctggcttcgcaggcgcggatcaggtggtggcgtgataacccggcatcgttcgggccactgcccatagggaaacgggccttactggctaccagcacttcgtggcgtttactgcccaatgcctggccgaggatctcctccgattggcctgcggaatagacgtcggcggtatcgaacaggttgatccccgcatcaatacacatggcgatttgattgcgcgcctcgttaacgtctgtcgcgccggttttggcgaacttgccttgtcctccaaaggtcatggtgcctaaacttagagccgaaactttaaggccggaccggccaagttgacggtattgcatcgtttaactccttactttggttgccatagatttttcagacgtaggggcacttttcctctggcggatttcattgcccgcctctgcgcccagcgtaaagctatccagcaccgctaccagggcgatcacgccaattacgataaaggccaactggaagtcggccagcggcaccgcgccctgttgctgcggcatcagcatttccgccaaccgcagcgccagcgcaccgatggcgatacccaggccgctgcccatctgctgggccatattgaacagggtattagctccgctcatgcggggttgcggcacttcggaaaacgccagcgtattcagcgcggtgaactgcatcgaacgtgtcaagccactgacaaacagcagcgtcaggatcaaccaggtaggggtctgcggggttagcagcgcgcaggcaaaaatggtagcggcattaagtaagccgttgactaccagcgtggtacgaaaacggaaccggtagaggattgctgaggtgaacggcttcattaccagattaccggcaaacaccgccagcaccaacaaccccgcatcgaaggcattcagcccaaagccgatttgaaacagtaggggcagcagaaacggcacggcaccgatagcaatgcggaacagagtgccgcccttaatagtgacggcgtaactttttacccgcatcgcccagagatctatcaagggataggcgtggtgtttggcgtgacgtatcgccaggcttcccagcgccaggctagcggccagacatgacagaggcactagccacgagagttgcggactgttgatcagatccagcccaaacatcagcccaaagcaggcgactccggtgagcacaaaacccaatccatcaaaggaaacgcctttctgcgcgggctcatgagggatcaagcgccaggcgaagaacagtgccaacaggccaagcggcacgttgaggatgaaaatccagtgccaggaagcgtaggtggtgataaaaccgccaaccggtggccccaggaccggggcggctaatcctggccaggtgatagtggcaatggcgttgatcagatcgggtttggcggtattacgcagcaccaccaggcggcccaccggcaccatcaaagcgccgccaaagccttgcaggatacgagccgcagtaaactgtggcaaggtggtactgagggcgcatagcaccgaggccagggtaaagataacgatggcggcggtgaaaatattgcgggcaccaaagcggttggcgatccagccgctggcggggataaacaccgtcagggtaagaatataggccgaaaccccgatgttcatatctaccggctgtacgccaaaggctgtcgccatttgcggcatcgcggtgacgatcaccgtagcgtccaggttttccataaagaatgccccggcaaccagcagaggaagcgcgctagcgcgcgagaaccaactcatggacggctccggctggagtacggtaaataggcagacataacagaaatcccgtttcaaaaatcactacgtcggatttttgagcataacgcatcacggggaggttaaaaagaagttaatggagtgattattagcgggcacagcaaacgtgcccgccagcgtgttgtagtcaccaggataaatggatgatgtcgtcgatcaactcggctttaaagctactcaagtcggccacggtggccttgatttgcggggaagaaatcggcacgccgttaccgatgacgatcacttgcccaccggcggcaagggcggagttcacgccagaaatcgcatcttcaaaaatcacgcatttctgcaccggcaggccaaatccggctgccgccatcagatagggttctggatggggtttgccgtgcacgatatcttccgaagtgatcatcatgtggggccgtgggatgcctgcgctgatcatgctttgcatcgacactttcttggcgccggaggtgacaattgcccagcattgtggcggcaactggcgcaccagctcaacggcaccgctaatggcactaacctgactgagagcctcgatggcgagcgttttgacttcatcaacgcaatgtgggttgtcaaagtaaggagagacgatccgcagcgtttcctcgatagtacgcccgtgaatatttgccagaacgtagtccacatccagatgatgccgggttgcccattcagaccacaatttctctatacaggctcctgagtccaccaaggtaccgtccaggtcaaacagcactgccttgcaagcgatagcgttcataagtccctttgatttaaagcttcggtttcccaataacaacagagtgatggcaaggcattgttgactgaaatcaatggattgtttaaatcacagccggaatgtaaaaaatgcgatattgatgggccgcatgaagccgcagagcgcggttaaaataaatggttaaggtttggataagaaaacagtcaggcagtggaaaaaagtgaaacaacatgatgctttttatcatggccgctccctcagaaaaaaataaagtatcggggctgaggccagtatggagccactgggcttcgctctatatattcacaaaagaaatgattggcaatattttgaaattatttcattatgactacttaatgggtagcataggttcatagaaaatcaatgtgaatggttgattatttgtcatgagcgcttgggtaatgaattgctataaccccaacctattgcatcaattatgttttttatcctgacataatccgcatgagggggactttatcccgtatgtcagcttgaaacactccctcgcgattaaaaaacaatcgctccagcttgcattaaagtaatcccggtataaattaatatcattaccgccattaaaacggtaatacacccacgagctaatcatgctcgtaacagcagtggctatagcacgacataataatagaggacaatcaagatgaaacttcgagtactctctctgatggttcctgctttgctgatggctggcaccgcaggggccgctgaaatctacaacaaagacggtaataaactggatttgtacggtttagtcgatggtcttcactatttctctgataacaatagcgttgatggcgaccagtcatacatacgtatggggctccgtggtgaaacgcagattaacgaccaacttaccggctatggtacgtgggaataccaggtcaacgttaacactccggaaagcgaaaacaatgccttcacacgttatggtttcgcagggttaaaagtcgttgattatggctcattcgactatggccgtaacaacggtgtcctgtatgacgtagcggcttataccgacatgcagccagaatttgacggttccacctatggtgccgaccagttcatgttccaacgttcaaacggtttggcgacctatcgaaacaataacttctttggcctggttgatggtctgcattttgctctgcagtatcagggtaaaaacggcagtcctgaagagactaacaatggtcgcaacgttctgggtcagaacggtgatggttatggtatgtcggtgaactatgatattggctacggtattagcgcagcgggagccttctttaattccaaacgtaccagcgagcaaaatggcggtggtgtatatagtggtatcatggggcgtggtgacaatgcggaaggctattcaggcggcctgaaatatgacgacagcaatacctatgtggccgtcatgtttacccagtcctataatgcagcgcgctttggcagttcaaacagcgacgcgtatggctacgctaataaagcgcaaagctttgaggcctatgcacattatctgtttgatttcggcctgcgcccatttgtgggttataaccaaaccaacggcaagaacctggggcaggctgctaacggtcatacctacggcagtgaaaacttggtcaagtttgttgacttgggtgcgacctattacctcaacaaaaacatgtccacctatgtggattataaaatcaacctgttggatgaaaacgacttcaccaaatcggccggtattaatactgacgacgtggttgctgtcggtctggtttatcagttctgatgacagagaaataagtcagcttacgataacgcggccttctggccgcgttttttctttgttctcccccgcagtatacagccgctagcctgttgagaaatttccagttatttttgctcaaacgaccatctgagcctaagctaggctatgttgctgaatttacagcttctatccaattggacgcagcgtccctacattaagacatggaggagtttcgatttgatgcgtttatccaccctggtactggcgatcggcgttgcattaagcacgcccgcgctggcagaaaccaatacccagacaaaggaggcgaaagtggccggagaagttaaacaggataagcagggacaaaacccgttctttaccgccagtcagttaccattccaggccccgcgttttgatgtcatcagcgaaagcgattatgccccggccattgccgccggtatccagcagaaactgacagaagtcgaaaaaatcgccaataacccggctgagcctacgttcgacaataccttcgtgccgctggaaaaaagtggcgcactgttgacgcgcaccatgaacgtgttcggcgcgatgacctccgccaacaccagcgacgcgctgcaaaagctggatgaagaaacctcaccgaagctggcggcgttaaatgatgccatcatgctgaacagcaaactgtttgcgcgcatcaaggcgatttacgatcggcgtgacagcctcaacttggacaccgagtccctgcggctggtagaggttacctacaagaactatgtgctggccggggccaatctttctgacgcggataaaacccaactgaaagcgttgaaccaggaagcggcgacgctgagcacccagttcaccaataaattattggccgccagcaaaaatggcgcgttggcgatcggtgataaaaccctgctggtcgggctttcagagggcgagttggcggcagcagcgcaggcagccagcgaacgtaagctggataagcaatggctgttggtgttgcaaaacaccacgcaacagcctgatttgcaaagcctgcaagatcgcgatactcgccaaaagttgttcgaagcgtcgatcaatcgtgcagaaaaaaatgactctaacgatacccgccaaactctggcgcggttagctaaagtgcgtgccgagcaggccaaactgctgggcttcccgaactatgccgcctggaagttgcaaaatcagatggcgaaaaccccggatgcggcgttggcgtttatgcgtgatatcgtgcctgccgccacggcccgggcagagcgcgaggccaaagatattcaggcagtgatcgatcggcaaaacggcggtttcaagctggccgcctgggattggcagttctatgccgagcaggtgcgtaaagagaagtacgatctggatgagtcacagattaagccttactttgagatgagcaacgtgctgcataacggcgtattctatgccgccaatttgctgtacggcatcagctttaaagaacgtaaagatatcccggtttatcatccagacgtgcgggtatacgaggtatttgataaagacggccagtctctggcgctgttctacaccgatttctttaagcgtgataacaagggcggtggcgcttggatgagcaacttcgttgaacagtccaaactcaacggcaccaaaccggtgatttacaacgtctccaacttcaccaaacccgcagcgggccaacctgcattgctgtcctatgacgacgtgatcaccctgttccacgagtttggccatgcgctgcacggcatgtttgccgatcagcaatacccaagcctgtcgggcaccaacactgcccgcgattttgttgagttcccgtcgcagtttaacgagcactgggtcagcgatccgcaggtatttgcccactttgccaagcattatcaaacgggtgaggcgatgccgcaggtgttggtcgataaaatcaacaaggccgacaagttcaacaagggctacgccatgaccgaactgttggccgccgcgctgctggatatgcattggcacatgctcggtgccgatcagccgcagcaggacgtggacaagtttgaggccgcatcactgcgccaggacaagatcgacctcagctatgtgccaccgcgctatcgctccagctatttccagcatatctggggcaacggctatgccgccggttattacgcctatctgtggacggagatgttggcagatgacgccttccagtggttcagcgataacggcgggttaacggcagagaatggccagcgtttccgcgagcaggtgttgtcacagggcaacagccaggatctggaaaagctgtacgttaaatggcgtgggcaggagccgagcattgaaccaatgttgatcaaccgcgggctgaaggataagtaactattgtttagcaccctccgagagcaggaactgctctcggagggttataacaatgccaagaaagagaattgtgtgaggccgatcgtttttctatgtaaccgaaattagccgtggtgagattaatccttgtaattaacagggttaccaacacgtgttggtgtaaataatcccaaaatccatcccattgttttaatgagtttatcttcagcacaaaattttcccctcgtataaaaaccataagaaatgccgttttcagactgggttaatatgattaatgtcacagattaaccgctgaaaacggcgtgacgacaagttacgatcataatctcaactccgatagttgccgctttactgttttcgggttccgatttaaaacaaacacctgttcaaaaacaaacaagtgttaattatgaccaaccgggaaaaacagatactgcaactccttcggcgggacccgttgattcaacaacacgaaatcgccgatattctaggtattagccgttctggtgtggcaggccacatcatgaatttaatgaataaaggctatattaaaggtaaaggctatattctctccgaacaccgctatgtggtcaccgttggctcggtaaatatggacgtttgtggttatgccaatacgcagctggtttatgaagactccaatccagggaaaataaagtgtaccccgggaggcgttggccgaaatatatcgcagaatattgcgttattaggtgccgaatgccatctggtttccgtggttggtgacgatttctatggcactacgctgctggaacaggcgaaattggcgggcgtcaacgtggataattgccatcggttgcatggtgaaaatacttcgacctacgtttcgctgctggatggcaatggtgaaatgctggtcgccatcaacgatatgcgcatcctggaaaaattgaccccggcgctgttatctcattccaaggatttaattcagcacagtggtgtcttggtgctggactgcaacctgaccgaagacgcgctggcctggttatttagcaatgccggtaatgtaccggtatttgtcgatacggtttccgcttttaaagcgccaaaaatcaaaaactggctctcgcatatccatacgttgaagccaaatcggattgaggcagaaattctcagtgggatgaaaatatcccaggcgagcgatgcaccagcagtcgcccaatggttccaccagcaaggcgtgcagcgtttagcgctgagtatgggtagccacggcgtgtatttcagcgaagtggacggccagcacggttggtcggcaccgctgccgactcaggtcgtcaatgtcactggagccggggatgccatgatggcggggctggtgagttgctggctggaggatttcccactcgatcacagtatccgttttgcccagggctgttcggcaatgaccctggcctctgagttcaccaacaacccgaatctgtcgcaaggcagcgttcaaaaacttctggaattacaatcatgcaaaatagcctaatcactcatcaatatctggatatcgcgcctgaagtggcgcttgcactggccgaaaatcggccggtggtggcgttggagtcgacgattatttcccacggcatgccttacccgcagaacgttgaaactgccttacaggtagaggaaaagatccgtgccaacggggcggtgccagcgaccattgcggtgatcaatgggcggatgaaggcggggctatcccatgatgagatagaaacgttgggccgcgaagggcaccgggtcgccaaagtgagtcgtcgcgatttgccgtttgtgattgccagtggcaaaaacggcgcaaccaccgtggcttctaccatgatcattgccgaactggccgggatcagcgtattcgccaccggcgggattggcggtgtgcaccgcggtgcacagcagacgtttgatatttcggctgatttacaggaattggcacaaaccaacgtggcggtgatttgtgccggtgccaaatcgatcctggatctcggtttgaccaccgaatacctggaaacccatggcgtgcctctggtggggtatggcaccgatagcctgcccgcattcttcagccgtaccagcccttattccgttagcgtgcgcctggatacgccgcaggaaatcgcgcgggcaatggccgccaaatgggctgctggcttgcagggcgggatggtgattgccaaccctattccagagcagtacgccatgtctgaagagaagatcaaccaggccattgagcaggctgttcaggagtcggtggagcagggtgtgtccggcaaggagagtacgccattcctgctggccagagtcgctgaattgaccggtggcgatagcctgcaggccaatattcagctggtgtttaataatgccgagttggcagccaagatcgcgggtcattatcagctaaattgcgcttaacgcttaaattagcactctacgtttgtccttgataaaacacttctgcctcggcaggcggcaggctattgccgtttgccgagtaaagaaggaaataaacaaaatagaagggggccttatggagttgttgcgcagtcttgcaggtatgtcgatcctgttattaatcggctttgtgttttccgtcaataaaagaaaaataagtgtgcgcacggtcggtgcggcattgttacttcaggtattacttggcgctattatgctgtatgtccccgcaggtaaatggttaatcaacgccattgccagcggtgtcaatcgcgtgatttcgtacagcgatgcggggagcgcatttatttttggcggcctggtagggccgaaaatgaatgagcttttcgatggtgcaggttttgtgttcgcttttcacgtgctacccgccatcatctttatcacctcgttgatttctattttatattatcttggggtaatgaaatgggtgatcaatatccttggctatgtcttccagcggcttatgaatatcagcaaggtggagtcctttgccgctgtcaccaccattttcctggggcaaaatgagttacctgcggtgttaaagccgtttgttaaaaacatgaaccgcaatgaactgttcacggtgatctgtagcggcatggcctcgattgccggttcgatgctggtcggttatgccggtttgggcgtccccatcgagtatctgctggcggcctcgctgatggctatcccaggggggatcctgtttgcccgtttgctcagcccggcgacggagccttcccgcgttgagttcagcgaaatgtcattcagtgataaacggcccgccagcattatcgaagcggcggctaacggtgcgatgttggggctgaaaattgcggtgggggttgccacggtagtgatggccttcgtcgcgctgatcgcgttgatcaacggcattatcggcggcgtggggggcctgtttggtgttgaaagcgtcagcctgcaaagcctgctgggctatctgtttgctccgttagcctacatcatgggcgtgagctgggaacatgccgatctggcagggggactgattggccagaaactggcaattaacgagtttgttgcctacctcagcttctctccttacctgaacgaaagcgcgatgttactcgatccgaaaaccatcgcggtgatttcgttcgcactgtgcggttttgccaattttggctcgattgccgtggtagtgggggcattcagtgcggtggtgccggaaagggcctcggaaattgcccagttagggttccgggcgctgttggcggcgacgctgtccaacctgatgagcgccaccattgccgggctgtttatcgggttaggggggatttgaagaaccggggcaattgcaggctaatccgtcctcgattgcccctcaccccaaccctc

SEQ ID NO: 305 - DNA, 1888 bp, unknown
  Altogen  635822 strain
  misc_feature (859)..(966): n is a, c, g, or t
aaaagaccaattccaacaggcggccaacattggcgccgggctagctgcgcgctggtttccgcacattgatgccacttttaaagaattcggcatcacatcagctgtagaccaggcgatgtttatcgcccagttcggccacgagtctggcggtttcacccgagtggtggagtcgttcaactacggcgtttcaggtcttcaatccacgttcggcaagcgactgtcaaaagaccagtgcgcgatgctggggcgtcagcgtggtgaaagtgtggtaccggtcaaccggcaggcggcgattgccaatctcgtttacgcaggccggatgggtaacaaagctgcaggggatggctggaaataccgtgggcgtggaattccgcagatcactggcctggataattaccgcggctgcagtgccgcattgaaagctgactttgtgctggtgcccgagctgcttgagcgtgacgagtatgcaatgcgcgccgccgggtggttctggtcagcgaatatatgcggccggttcggtgctgacgtcgaaaaagtcacgaaggtgatcaacggcggactgaacggtatcgatgaccggaaagcgcggtttgcagtagcccgcaaggtgctggcatgaaatggctacccgagcccatgatgattcttggcgccgcgaccatttttttcgccatcctttttcaagtggcctctaacaagctggatgctgcaaacgtcttggtcgcaacccagaaaaaaacgttagaccagcagtctggattaattgccacgctgcaaacgcaggatgagaagaaccgcgcgttgatggccagtcagctagccaaagagcagcagctgcgccagcaggccaccgccaacnnnnnnnnnnnnnnnnnnnnnnnnnnnnnnnnnnnnnnnnnnnnnnnnnnnnnnnnnnnnnnnnnnnnnnnnnnnnnnnnnnnnnnnnnnnnnnnnnnnnnnnnnnnnccctgagtccgtattcaccccctgcgagcaacccgttctgaacggaatgacatggggggatgcagtcagctacacgctggcacttcaagccgcattccaaatctgcgctgggcaagtgtggacgctgaacgcctggcgcgctggattgctcttttaggatttttaaacgataactaagaatcttatgttgttgattattttaaattattgtcgtttctttggtttattagacacgcaaagtaaacccctgacattaaatcacatcagggggagattattacgctctctcagggatttttgctaatgcagataaaatctctgattttaacccattgagtacctccttatactctggctgttcgacattgaatgagtttaataagtcaacaaagcctactttatcaccatccttctcaattaatttaacaagcatttgatttgtaatttctttataaatccggaactctaccatggctttttttatttcaaacatctcacgcccaaggccgatcgagttatcactgtccatgcgtttcctcatttagagttaatcagccatcactctgatttaaacacccatgcacgcacatgggtgagctgaagcatacaaagataggcgatatgtagtcgtaagcaatcctgatgtttgaacagtagcattacaggtgacattcacagagtgtcatcgataatgcgcaagcaaagccatcagcaacccagacacaccgtaagctgatggggtaaactgactatgtggtgaatgcgtaggctgatgcgctgaggtcaaagagttgaccggcggataactcgccgtcgggccgtaatgcttgagacaagccggaaagatagcagcaccggccaccacaccttatagaaagctcctgcttaaccgccggggcttttttgttttacggagatcgct

SEQ ID NO: 306 - DNA, 9731 bp, unknown
  Altogen  635822 strain
  misc_feature (80)..(206): n is a, c, g, or t
gcagaacctgttgcagatgggcgtgcaactcatcttgctccaagggatcctgtgcaacgtagtatgccgtcagatgggtnnnnnnnnnnnnnnnnnnnnnnnnnnnnnnnnnnnnnnnnnnnnnnnnnnnnnnnnnnnnnnnnnnnnnnnnnnnnnnnnnnnnnnnnnnnnnnnnnnnnnnnnnnnnnnnnnnnnnnnnnnnnnnngttaccgtccggcaggtaacggccttgatccccggttttataaaggcgggcattttcaccacggctgcgttcggcatcgctgcggaacggattcgcaataaacgcatccgctgtcgcctgcggtttgttcagatagccgcgcccaacgccagcaccgccgatatacagctcaccaatcgcaccctgtgggacggggcgcaactgttcgtcgagtatatacagctgggtattactgattggctgaccgatgggaacggtgtaatcaaacgcctgcgacgccgtattggtcaaataggccgtggcgtaggttgtcgtttccgtcggcccgtaaacatgcaccaacttgacctgcggataaagcgctctaaaacgattaacatggttaacggacacctgctcaccgccgaacagcaggtagtccaactgctgcaatccaggcagttcagcatccaccaacgtattaaagaaagcggtcgtggcaaagaaattgctgatctgacgatcgacaataagctgagagagacggtctaagtccaggatatttggcttatcggcaatcaccaacgcggcgccatttaacaacgccccaaagatgtcataaatggaggcatcaaactgatagcctgaaatgccaagaatgcgatcctgttcaccgatctcaacataattgggattaatcaccagccggttcacacagcgttgctctatcaacgtccctttaggatatcccgtcgtaccactggtataaatgacatacgccagatcgtgggggccggtattgctgcatgggttatctgttgcacagcgcgccaaacgcgcggtggtttccggtgcatcaagagggataagcatggcgccgggtgccatctggtctagcctttgcaaagcctgtcgttggcaaagcaccgcttttaccttggcatccgcaataatatagccattgcgctcatcgggggaatccggatccatcggcacataggccgcgcccgctttcagtatggccagaatgccaatgaccaactgctcactgcgctcaagatagagacccacgagatcgttggcgcgcagctggcaacattgctgtaaatagtgcgcaagccggttcgcctgttgatttaactgtgcgtacgttaacaccacgtcgttaaattctacggcgacgctgtctggtgaggcggccacgcgagcttcaaacagtgcggcgagggttttatcatgctcgtagggcctacgggtatcattccactggtggatcatcgtttgatactgcgccgcctgcagataacgcaactcggtttgagactgagagacaccctgaagaatattttctaccagcgtcctcatcgtgttcagcagttgttcgatcagcacgtcatcaaacagttcaccggcataatgcaggctcaacgccagatgttgctgttccaacacggtcaccaccaacggataatcttgcttctcgttagcactgccgaaacgtagccgtaaatcgctatcgatgtccccactgggcattggatagttttcaaagacgaacaaagagttaaacaggcgtttacctgccggttgtagctcagccagattgacatggctgcgggtgttcgcctcgttaatcgcgtcctgcaggttttgaatagccgtgaggatcgacacagaagcctgatgatcgacgatcagcggcagtgtgttgatcaataatcctaccgtttgatccacgccatccacgggcaggttacggcctgaaaccaccgtgccaacgatgctggccgcattgccagaataaatactgagcactttgtgccagcaatattgcaatagcgcattcagggttatcgcgttctcggcggtgaacgatttcagctgttggtaacaaggttcatcaaacatcagctgctgtgttttcggcgttttaatgtgcttatattcatttaactgaacgtgcttcgcctgcccgcacagcaagatatttaaatcttcgggttcatcctgtggtgccagatagtcccgccaatacggtaaatgctcgcttttgtgcgactgtatatagcgctgaacctggtggaaaccgtggtcaccttcctgcttcaacgtttcaccacgcaacaatgccagatagaatttatgcaccgcttcaatcagtagcgggttactccagccatccatgatggcgtggtggcagctgaaaatgcagcggtaacgttcatccgcatttttgaccacatagacacggaagatcccgctgatcgacaaatcgtaaggccgtgctcgatcctgggcagataaatcagagaagaaagcttgctgttggtgctcgttttttccactgagatcaaagaaatgccagttcagtgcagcatgggcatcaacaatctgcaccaactcttcatcccaattaaaccgcaggcggagcgttggataatgctgctgagcatgtaaccatgcctgcttcagacaggcgatatcgagcgcattgtcatagtcccagaacatctgggtatggtaggcatcgtcgacttcaccctgcgatagcgcgtggtaaataaagccttcctgcaaactattggccagatacactgactccagctcggtatcacgctgcagagcgtcaagtgttgcttgaggtattaccccgtcaatatctcgcgcggtcagataagtgcggctttccgccagcaagcgctcaataacgcctgcaatcgccccctggtaacggctcgccaggtgttgcaatacttcgtctgccaggtaaccggagaggcgtattctcagttcccccccaactacaccacagttgacgctgagcagatgcgcttcaccattctcatgcgcaacggtttgtccgctgtttgtagggctgaagcaccatccctcctgctgcacctcatcaaagcgccctaaatagttaaagctaaccggtggcagctggtcggcgtcataccccatcaacggcgcaaatccaacgccccggcgcgggatcccgccaacggtctctttgacggtcacgatccgttgacgccagtccccctcgctactcaagcggaccgggtacattgttgtcagccagcctaccgtacggttgatatcaacgctggtatcgagcgcttcccggccatggccttccaacgtcagatactgggtatgcagcccggtaaactctttgaggatctcaacaaagctcgctaacagaagatcgttgacctgggtattgaacacatgatgcaccccgcccaacagatgctgcgttaaggttttgtttaacgatagctcgcgttggctcaaggatggcgaggtgaaaagcggcgctatccgttggcgatagtcaccaagaccgccaatcacagtacgccaataaagcgtttcctcattggctccctgatggttggcataatcctgtatctgggcagcccactgacgataactggtgggtttatcacctaaaatctcaacgggatcgctaatacccgccgcgtttcctgccagcgcgcgataaatcctctccagatcctgtttgatgatatgccaacttaccgcatccataatcaggtgatggaaagcaaaatgtagcttcgcccgcggcgcattttcactgtttatatagccaatatggcacagcttaccgccgaagatatcaaactcactttgccaccgatcaaagagcgcgatttgttgctcggcacccacgggttcatcaataaccgacagcggtatttcgccgacgtctgattggtagtgctggctgtaaccaccatcactgtcatgcgcaaagaccagtctcagggcatcatgataggcaaataacaacgccaggctcttgttgagtatgccaatatccaacgggggaacatccagcacaaaggattggttccagtgctggtaagcggcaaaagtcccctgatcgatacgatcgaagaaccactgctggatcggcagcaactgcgcagggccgctcaacatccccgactcggagagatgtttgatgtgatgttcatcggcatccagcacgatattccgggcaagtaaacgcacggttttacagtcaaaaatatctttgacgctggccgccccttttagcctttgacggatcattctcaccatctgaatagcgctgatactgtcgccgcccagcttaaagaaatcgtcattaacgccgacatgacccggcgcctggcctaatatctcaccatagatctggcatagcgccatttccatctcatcggcaggagcgacatagtcatcctgcccgctcagatctggcagcggtaacgccttacggtttaatttaccgttaaccgtcatcgggaacgccgttaaatgaacataggccatcgggatcatatagtcaggcaaagcatccgccaggtgcccaatgatctgctctttgcccaaggcaacatccgcaacatagtaggcaactaacgacagcgctcccgtcgggagcctatgtgcaataaccgccgattggataatctgcggaatttgcaccagctgcatttcaatttcgcttaattcaattctgaaaccgcggatcttcagctgggagtctcgcctgccgacatactcaatgtgaccgtcggccaagcggcggacaagatcgccggttttatacagccgtgtcgcttcattacgctgcttttgctcgtcgctctggaagggattggcgataaaggcacgctcggtctgctgcgtatcattcagataaccccgggccaggccaacgccactgatataaagctcaccgatcacaccgacggggacaggtgccaggtgttcatctaaaacatgcacatcaagattcagtagcggcaggccgatattgaggttgccatcgccattttcgtaatagtgcaacgtcgcacagacactgctttccgtcgggccataggcgttgataaccgttgttccctgcgcacgataacgttgcataatctcacgattacaaggttcaccagcaacaaccagagtagagagcgctaaaagggagtttttatccaataatgccgggggaatagtggcaatatcaatgcgagcatcggcaatatattccgctaacgcgtcaaaatccttgcgcttattttccggcaaaatatgtatcacatggccattggcaatcgccgtaaagagctcagagacatgggcatcaaaaacataggcggcataccaaagacattgctttatcgactcctcgccaggtgccaagccaaacgcttcgccctgaaccagcgccagattgattaatcccgcgtgttcaatcatcacaccttttggcttacctgtcgtgccgctggtataaataatataggctaactggtgcaaatttatggcgatatcaaggttctctgactgctgctgagcaaccaggtcgcgctgaaactgcgggttatcaacggcaataatcggcacctgtggcaactctgcaatctgattcaaatagctcacgctggcgctatcgcccaagatggctttcgcttgcgtgtcctgcagaataaaacttagcctgttcccggcctcgccagggttaagcggaacatacgctgcccccgttttgagtatggcaagaatacatacgggcattgctgccgacttttcaaggcacagggcgacgaaatcgccgctcttgatccgcaattcacactttaggtaatcagccaggcggttggcctgttgattaagctgttgataggacagtgtttgattgtcatagacaacggcgttgcgggctgggtaagtcgcggctatacgctcaaattgttcgacaatcgaatgttgagggactttagccccagcgcatacatgctgggtgtggcgtggcggctgcgcaatcagcgtgatggtctttattggcgtgtctacttcacctgcaagcagcttatcaagcgtattaataaacagatctttatacagatcgataaaattctcaaccaaagaggcatcaaggacgttgcgatcaaacctgacgcgatagttgataccactcgctaacacctcctgttcaaacaacagttcattcaccaggtcaatatggaagtcgtgattggccgactcatccacgatgccactaaaatgggtatgatgatcacgcaggaaagtttgggcaaaagcgacatccagtacaccggtggcctcaccacaagccaggatctcatggacaggtaaatatttggcttttgtctgctttaatgctttgtaataacgatgaacactggcaataacgctacggatagtcgcatcatccgcaaagcgataatcgatagccaaggtattgatatgcgcgccatacaacagctccttaccttcagagatcgccaccgggtaagcgagcgcaacggctttttgccctgacattttgtgtaacagcagtgccatgaccatttgcccaaacaggtaagtggtcaacttatacttgcgcagtaacagctttacgcgtcggctgatatcttcatcaaaaccaaacagtaactcgctgatctgacgccgggttgcaacggttgtaagctggcggcctgtttgtaaaaagcgtaaatcaacgccttcaagatcgcccagacgctcgcgccagaactcacgcatttgctcgcctttttcttgcagaagcgtggcgaaattatggcaaagctgctggtgcatagccccttgttcttgcagcgatggcacctgatagtcgatgccattatagcgtttacgccatttgtcccagatctcttcggtactgatgccatcgacaacaatatgatgaaaaataaacaatgtacggtatcgttcttccccaagagaaatcaaatgtatccgtaccagcggaccatttcttaagtcaaagggggcagagactaacgcataaatttcttcatcggttaacggggtgtcgtgataggtgactaaattgaaaaagggctctctcggtatccaaaaggctccatcaggcccgtcatcaatgttatgacgggtaataaaatgctcgttaagcagctgttcaaaactatcgttatacttttttttgtctatttcgccgacaatagtattgtcgatcaccatattgtaatcgctgcgatcgggatcttgtagccactcataataaaaaattgtctgatagggggtgagcgttatttttctcatgtaactctccataattattttactccttgagattttttatttataaatattttggctgatttgagtcatagcacggccaacaccgtgagcagcgactcacagcaatagatatcacctgaacgttattgtgccgaaggttcagcagtgctcgcggatcagggtgaaattatggtttttctgattattcccgtgccaatgcgtcaatgggatccagccgcgcagcgctgcgcgcagggagataaccgaacacgacgccaataccggtggaacacaggaacgcactcagcagagccaccggcgggaagttgatctgccagcccggcatcgccagctgcaccagcaagccgatggtgaacgacagcgcgatccctaaaatcccccctaccaggcagaccagcaccgcctcaatcaggaactgttgcagaacgtcgccggaacgagcgcctacggccatgcggatgccgatttctcgcgttctttctgttaccgagaccagcatgatattcatcacgccaatcccacccaccaccaacgaaatcaccgccaccaggatcaggaacagttgcagcgtacgggtggttttttccgccgtttgcaccaggctatccacgttgtaggtaaagaagtctttcttgccgtggcgcagcgtcaatagccgcgtcagttgctgttccgcctcctggctgttatagccatcgcggatacgcacggtgatcgaatcgaagtagtcgttgcccatcaggcgattggccatcgtggtataaggcacccagacgctgagcatcttgctgctgccaaacatggtttgcttttccttcgccacccccaccacggtcgcaggcatattgccaatcaggatcacctcacccagcacgtttttttgttgcgggaacagacggcgctgggtgttggtatcgatcaccaccgtctgcgtctgggactccacctgcctgacatcaatagccgttccctgagaaaactccatgccgtacacccggaaaaactgctcgctgacgcctgccacattagccgccacatcaatattgccaaagcgcagacgcatgctgctgcgagtcatgggagaaagcgcgctgatataaggttgtgcactcaatgcactcagatcgtcatatttcaacgcctggcggagggttgggtcatcgtcaccaaaatccttaccaggatagacgtccacggtgttggtaccgatggatttgatctcggccaatacctgctgttggacggcatcgcctatcaccaggatcgagatcaccgaggcaatgccgataacgatccccagcatggtcaatagggtgcgcatcttgttggccgccatcgcccaccaggccatcgacaacgcctcccggaaacggtcggccatctgctgccaggaaggggctggcgtggccagttccaacgacttggcctgtggcttgctctgtgcctgtggccgagaatcgccaatgatttcgccatcgtggatttcgataatccgctcggcttgctgcgctaccgccggatcgtgggtaacgatgatcacggtgtgtccctgctcgcacagctgcttgaggatcgccattacctctttacctgagtggctatcgagcgcaccggttggctcatccgccaggatcacctggccaccgttcatcaatgcccgcgcaatgctgacacgctgctgctgcccaccggacagctggcttggccgataggcgatacgttctcccaatcccaggcgttgcagcaaggccgccgccctggcatgccgtgccgagtgactcatcccagcgtaaacggcaggcacctccacgttatgcgccgcactcagatgtggcagcaaatgataacgctggaagataaagccaaaatgctcgcgccgcagctgggctaatgcatcgctatttagcgtggccacgtcctgcccggccacgcggtaaatgccgctgttgggtttgtccagacagccgagaatgttcattagcgtcgatttaccggagccggaagccccgatgatcgccaccatctcaccagcatctatccgcaggctgatgcttttcaatacctccagggtttgctcaccggattgataactacgccggatatcactcagttccaacagtgcggccatcagctgccctccacgccgccgcggctgacaatcacctcttcaccggctgtcaatccactgacaatctgcacatccaggttgttacgcatgccgatcgtcacctcccgcagctgtttctggccctgttgcagcaccgcaacgtggtaacggttatcggcgatttgttcccctaacgctaccagcggaataaccagcgcatcgctggcgccagccaactgaatatgcacctgcgcggtcatttgcaggcgcagcaacccctgcggatttggcacttcgaaacgcgcgta

SEQ ID NO: 307 - DNA, 75426 bp, unknown
  Altogen  635822 strain
  misc_feature (2498)..(2528): n is a, c, g, or t
  misc_feature (2593)..(2680): n is a, c, g, or t
  misc_feature (13818)..(13834): n is a, c, g, or t
  misc_feature (37549)..(37549): n is a, c, g, or t
  misc_feature (75318)..(75366): n is a, c, g, or t
taccgcttggcgataccccaatagcaaattaacttttttacagcgctccatctgggaagatggctggggtacctggattcgaaccagggaatgctggaatcaaaaaccagtgccttaccgcttggcgataccccacctgctgtatgcgcgacgatgaaagaaaatggtgcgggaggcgagacttgaactcgcacaccttgcggcgctagaacctaaatctagtgcgtctaccaatttcgccactcccgcaaaaaagattggtggctacgacgggattcgaacctgtgaccccatcattatgagtgatgtgctctaaccaactgagctacgtagccatctttttcgctcaaccttcatcggcgttgcggggcgcattatgcgtatatggccgatttgcgtcaactagttttttcccgaaaaagcgactgggcgggttgtttgtctgggttgtgaacagtatggtgataaaaacggcagttcggagggttaacggttgaaaacatccacaaaaaagcgggccatcaggcccgccgaaggtaaaacggtgacggtttacttataggctgactggtgtacgcctacggcacggcctgatgggtcgtccatctttttgaaggattcgtcccattcaatggcttttgccgacgagcaggctacggaagggccgccagggacacattccgctgcgctcggcaacgggaacagctcttcgaaaatctcgcggtacaggtagccttctttgctgtttggcgtgttgtacgggaagcggaaacgtgccgtttcaagctgttgatcgctaatctgcttggcagcgacttcttttagcgtatcgatccagctgtaaccgacaccgtcggagaactgctctttctggcgccaggctacgctagcgggcagataagactcgaagcattggcgaataatgtgcttctccatcttgccgttgccgcacattttatcctgcgggttgatacgcatcgccacgtccaggaagtttttatccaggaacggtacgcgggcttctacaccccaggcagacattgctttgttggcacgagcacagtcgtacatatgcagcgccagcagtttacgcacggtttcctcgtggaattctttggcatttggcgccttatggaagtacaggtagccgccgaacacttcatccgccccttcgccagacagcaccatcttgatgcccatcgctttaatcttgcgtgacatcagatacatcggtgtggaggcgcgtatggtggtgacatcgtaagtttcgatgtggtagatcacatcgcggatggcatccaggccttcctgcaccgtgaagtggatttcatggtggacggtgccaaggtggttagcgacctcttgagccgcacgcagatccggggaaccttccagcccgacggcgaaggagtgcagctgtggccaccaggcttcactgcgctcatcatcttctacccggcgtgcggcatattttttggtgatggcagagatcaccgaggaatccagcccgccggagagcagcacgccgtaaggtacgtcggacatcaggtggctttttaccgactcttccagtgcgttgcgcagggcgttggcatcggtgacgttgtctttgacgttgtcatagtcgaaccagtcacgctggtagtattcgcggatttcaccgtcctggctccacaggtagctgcccgccgggaactctttaatgctgcggcagactggcaccagcgccttcatctcagaagcgacatacaggttgccgtgctcatcgtgccccatatacagcgggatgatgccgaggtggtcgcggccaatcaggtaagcgtctttttccgtgtcgtatagggcaaaggcgaacataccttgcagatcgtccaggaagttcgggcctttttcctgatacagcgccaggatcacttcgcagtcggagccggtctggaattgataatgctcacccaactgctgacgcagggcctgatggttataaatttcaccgttaaccgccaatacgtgggtgtgcgcagcgttgtacagcggttgggcaccgttattcacgtcaacaatcgacaggcgctcgtgaaccagaatggctttatcgctggcgtaaacgccggaccagtctgggccgcgatggcgcatcaggcgtgacagttccaacgctcttttacgcaattcaaccggatcggacttcagatcgagcacaccgaaaatagaacacatacaaactctcctaacgacattttatggcggtgatgtgatgtacagcgcgcctgcatgtaaagtcaacggtgcggctttgctgccttctgataatgaaaatgcgtcaaaagctgaggtgtatgcaagcgatttagcgttacgctgaaaaatagtcttggggtggggtgttaaaattagtggatgttcaattttaagcggcaaaaattgaataatatctaatttttcgtcgaatgaggcgagtgtgggataaattttctggcgtttcgatgatcgatgttttnnnnnnnnnnnnnnnnnnnnnnnnnnnnnnngtcttgattagcttgtgcgacttcggaaagaagggtgtaagaacaagaaaggcaaggtattacgnnnnnnnnnnnnnnnnnnnnnnnnnnnnnnnnnnnnnnnnnnnnnnnnnnnnnnnnnnnnnnnnnnnnnnnnnnnnnnnnnnnnnnnntcaagcgatcaacgaactcgatcggtcccctctccctgtgggagagggttagggtgaggggccattgcttgcggcttaaaaaatagtgatatccgccacggaagggaagatatggctcgggcggaatggcatggattcaacatcgttcagcgttgagacgccagacagcaccagcacggtttccagcccggcctggaagcctgccaggatatcggtgcgcaggttgtccccgataatgaccgtctcttccgaatgtccctgcatcttgttcagtgcggcgcggataatccacgggctaggcttgccgacataaaacggcttacggccggtgatcttctcgatcggcgcacacagacccccacaagccggtgtgaaaccgtggccatgggtatccgggttagtggctataaaccgtgccccgttgttcacgaagaaggccgctttatgcatcatgtcccagttgtaggaacgggtctcacccacgatcacgaaatccgggttgatatcggtgatggtaaagccggctttgtagagttcgtggatcagtgcgccttcgcccaccacataggcttttttaccttcctggcggcgcaggaaatcggccgtcgccatcgctgaggtataaaacgcgctttctggcacgtccaggccagcggcggcaaagcggttggccagatcctgggcggtttgcgaagggtagttggttagcaccaccaacggcatcccttgttcctgaatacgagccaggaacagatcggctccagggatcggggtattgtcatgcagcagcacgccgtcgatgtcacatatcacgtttttgatagtcattgttgctggtctcatgatgaacggcagggcaaaaaagccagaagtgcatccctgccaaacaggcagtttaactttctagcagccgttggagaagtacaccgttgagcattgcccgtttagccagggcaaaagcaccgatcgctgaacggtgattgagttcggaagtgaccacgggcaggtttctgcggaaatccttcagcacctgggtgttgatgcagctttggatggcgggtaacaacactttgtccgcttcggtgatttcaccggcgatcaccactttttgtgggttgaacaggttgatagcgatggctaccgccttgcccagatagcggccaacgtgttcgatcacttcgctggccagcaaatctccgcgattggcggctttgcagatggcggcgatgctacagtcgtccagcgtcattttgcttgggtagccctgagtcagtaggtggcgtacgcgctgttcgatagctgcgttggccgccacggtttccagacagccgaagttaccgcagtggcagcgttcgccgaggggatcgatttgaatatgaccaatctcccccacgttgccgttattaccgaggaagattttgccgttgacgatgatcccggcgccggtgccccggtgcaggcgcaccagaatggagtcttcacaatcccgggtagccccgaagtagtgctccgccaaggccaggctgcggatatcgtggccgacaaaactggtgacgttgaagcgttgctgaagatgatcgaccaacgcccagttatcgacgttgatgtgcggcatatagcgcactacgcctaacgccggatcgaccaggccaggcaggatcacggcaatggcgatcagttcgcgcagtttgcgttggtaactttcgataaactgcgcaatggcgttgagcagtgcgttttccagtgtctcctgggtgcgttccggcagagggtagtgctcctctccgagcgacttaccgcccatatcgtacagggtgatagtggcatcatggcggcccaggcggacggcaacggtgtggaaattacgggtttcactgacaatggaaatggcacgacggccaccggtggaggcttgctgatcgacctctttgatcagcccgcgctccaacagttggcgagtaatcttggtgacgctggcgggggcaagctgactgagttcggcaatctgaatgcgcgagatcgggccttgctggtcgatcaggcgatacactgctgcgccgttaagttgcttaactaagtcaacattccctatttgtgcttgtccgccagtgctcatcaataattctactcgctgttcatggattaaacctcgttgccgttaacgagggtcttggtgatttggtaatcacgggtaaaggcggtcaggttggcgaccttgccggcttcgatggtgcctaaacgctgttcgacaccgatagcgcgagccggatagagcgtcgccatacgcagcgcttcgtccagtgcgataccaacatgctctacgctgttttgcaccgcttcgatcatggtcagtgcggagccgctcagagtgccgttttcgtcaacacacaggccgtcacgataataaatggttttacccgcgaaaataaactgatcgatatccgcgcctgctggtgcagtagcatcggtgaccagcaccaatttatcaccttttacccgcttggcgttacggatactcgcccaggccacgtggtgcccatcggcaatgatgccggtatacacttctggcgtgtcgaagatcgcgcccatcaggcccggttcgcggccgctgatgtacggcatggcattgtacagatgggtggcgaaggttatgcctgcggcgaaacccacgcgtgcctgatcgtaagtggcgttggagtggccagcggacaccacgataccggcgtcgctcagctgtttgataaagtgaggttccaccatttctggcgccagggtcactttgctgatcacgtcggcgttggcacacaggtagtcgatcatctcgctggtaggcttgcggataaacgccgggttgtgggtgcctttcttctccaggctcaggtacggcccttccagatgcaggccaagggcctgattgggatggttcttcagataagcgcgcatcacgttgatgccgtgcttcatataatcgtcgctgcaggtgatcagcgttggcagatagctggtacagccggatttctcgttggcgcgctgcatgatttccagcgtggtttccgagatggcttccagtgagtcgttaaattgcacgccgccgcagccgttaagctgcacgtcgataaaaccgggggctaggatggcgccacccagatcgcgcgtttcgatgcctgctggcagttcggccagtgggcagactcgttcaatcaggccatcagcaatcactaccgcatggtcatcaagcacgtcatggccggtaaaaatccggcattgggttaaagcgaacatgtagccccctgcaaaaaattaaagactattaacgctttccgcttccaactcgcggaaatacttaacggttttcaccttcagttccatggtggacggttcgtcacaaaccaccacggctttggcatgcagctgcaggcagctaatggtccacaggtggttgatgctgccttccactgcggcttccagcgcctgtgccttgccacggccggtgaccaggatcatcacttcttccgcatcgagcagggtgcctacgccgacggtcagggcatattttggcacctggcttacgtcaccgtcgaagaagcgggagttggcgatgcgggtttcttcggtcagcgttttgatacgggtgcgtgaagccagggaagacgctggttcgttgaacgcaatgtggccatcgaagcctacgccgcccatgaacaggttaactttgccgtaggatttcattttggcttcgtactgacggcattcttcatcaacgtctgctgcgttaccgttcagcaggttgatattttcacgtgggatatcaacgtggtcgaagaagttgcggtacatgaaggtgtggtagctttccgggtgttcctgcggcaggccaacatattcatccatgttgaaggtcacgacgtgcttgaagctgacttcaccggctttgtgcatcgcgatcaggtgtttgtaggcttccagcggggtgccaccggttggcaggccaaggacgaacgggcgatctgcggtcggtttgaaggcgttgatacgctgaacgatatggcgtgcggcccatttgccgacttgagtagtgtcttgtagtgggataagtctcatcgtacacctctaggtagaataaactgtgtctatactggtacgggcaacaaccgtagcttaaagcgtaactcagctttgtgaagctggtattcgggattactgtccgttgattttttgaatgataaaataagttttgtgcgatggctagcaatgtggcagtttaacactactttttggtgacatttgtcacaaaaaaggaggttttaatttgcgatacgaaataatttttttacactccgcatgagtgatacgtgccaagcgttatttctaaaaaggtagtgagttatctcaataaactgccaatagggtccggcatcggacgaatagggggaaaaggtgaacattcttagttatttacaaaaggtgggtcgggccttgatggttccggtagccacactgcctgccgcggccatcctgatgggcgtcggctactggattgacccggttagctggggtggggacaatgctctggcagccttgttcatcaaatccggttcggccattatcgatcatatgtcggtcctgttcgccattggtgtggcttacggtatgtccaaagacaaagacggtgctgctgcactgaccggttttgtcggcttcctggtagtgaccacactgtgttcacctgccgccgtgtccatgattcagaagatccctctcgatcaggttccagccgcctttggcaaaattgagaaccagttcgtgggtatcctggtgggtatcatttctgccgaagtctacaaccgtttcagcggtgttgaactgccgaaagcgctgtcgttcttcagcggccgtcgtctggtgccaatcctgatctccttcctgatgatcctggttgccttcatcctgatgtacatctggccggtggttttcaacggtctggtcagcttcggtgagcacatccaaaaactcggctctgccggtgccggtatctacgccttcttcaaccgtctgttaattccggtcggtctgcaccatgcgctgaactcggtattctggtttgacgttgccggtattaacgatattcctaacttcctgggtggcgcgcagtctattgaagcgggtaaagccacggtcggtatcaccggtcgttaccaggcaggcttcttcccaatcatgatgttcggtctgccgggtgcagcactggccatctaccactgcgcacgtcctgagaacaaagcgaaagtgctgggtatcatgatggcgggggcgttcgctgccttcttcaccgggatcaccgagccgctggaattctccttcatgttcgttgctccagtgctgtatgtgatccatgccgttctgaccggtatctccgtgttcatcgcagccagcatgcagtggattgccggttttggcttcagtgccggtctggtggatatggcgttgtcaacgcgtaacccactggcgacccactggtacatgctgatcccgcaaggcctggtgttcttcgctatctactacgtggtcttccgcttcaccatcaaaaaattcaacctgatgaccccaggccgtgaactggccgttgccggtgacgaaaccgacggttatgacgtggataccgctgcgggtaagaacgaagatgaaaccactaccctggctcgtcgctatgtgagtgccatcggggggtctgacaacctgaccgggatcgatgcctgtatcacccgtctgcgtctgaacgtcaaagattctgcgttggtgaacgatgctctggctaaacgcctgggtgcttctggcgtgatccgtctgaacaagcaaagcgtgcaggtaatcgtcgggactcgtgccgaactgattgccagtgcgatgaccaaagtggttgcagcaggcccggtagcggcagcctctgctccagccgccgcagccgctgcggcagaagttaaaccgcaggctgtacctaacgctactaaaaccgtgttggaagcgctggtggcgccggtaaccggtgaagtggttgctctggatcaggtgccggacgaagccttcgccagcaaagcggtcggtgacggtgtggccattcgcccaaccgataaaaccgtcgtggcgccagctgatggcaccgtggtgaagatcttcaacaccaatcacgctttctgcctggaaacagacaagggcgcggagatcgtcgtgcacatgggtatcgacaccgtggcgctgaacggtcagggcttcaaacgcctggtggaagagggtgctgaggtgaaagcaggccagcctatcctggaaatggatctggaatacctgaacgccaatgcgcgctcgatgatcagcccggtagtggtcagcaacgctgatgactatgctggcctgacggcgctggcaaccggcaatgtggttgctggccagaccaagctgttcgagatccagaaataagttgggtttaaccctggcttcgcccgggcgttaaacgggcggtaagcagtatcagcgggaaaagagcgatcttttcccgctttttttgtttttgcaccatgggaacttgacgaataacggttgtttctgggcgcggcttattggaacatagaaggttatatgtgtagcgctttgcatttgaggaatagtgacatgagtgaggcagaagcccgcccaaccaattttatccgtcagatcattgatgaagatctggcatcagggaagcatacgtcggttcatacacgtttcccaccggagcctaatggctatctgcatatcggccatgccaagtccatttgcctgaactttggtatcgccaaggattatcagggccaatgtaacctgcgcttcgatgacaccaacccggtaaaagaagacatcgaatttgtcgactccatcaagcacgatgtggagtggttaggctttacctggagcggcgacgttcgttattcctcggactatttcgatcaactgcaccagtatgcggttgagctgatcaacaaaggcctggcttatgttgacgagctttctcccgagcagatccgtgaatatcgtggctcgttgacggctccgggcaaagacagcccataccgtacccgcacggttgaagagaacctggcgctgtttgagaagatgcgtaacggcgagtttgccgaaggcaccgcttgcctgcgcgccaaaatcgatatggcctcgccgtttatcgtgatgcgcgatccggtgatctaccgcatcaagtttgcggaacaccatcagaccggcaacaaatggtgcatctacccgatgtacgatttcacccactgcatttccgatgcgctggaagggatcacccattcgctgtgtactctggagttccaggataaccgccgtctgtacgattgggtgctggataacatcaccatcccttgccatccgcgtcagtacgagttctcacgcctgaatctcgaatacgccatcatgtccaagcgcaagctgagccaactggtgaccgagaagatcgttgaaggttgggatgacccacgtatgccaaccgtttccggcctgcgtcgtcgtggctatacggccgcctccattcgcgagttctgccagcgtatcggcgtcaccaaacaggacaataacgtcgagatgatggcgctggagtcctgtattcgtgacgatctgaatgagcacgcaccgcgcgccatggccgtgctggatccggtgaaggtgatcatcgagaacatgtcgcaagacgtggaaatggtgaccatgcctaaccacccgaatcagccggaaatgggcagccgtgaagtgccattcagccgcgaagtgtatatcgatcgtgcagacttccgtgaagaagccaacaagcagtacaaacgcctggtgctgggcaaagaagtgcgcctgcgtaatgcgtatgtgatcaaggctgagcgcgtagagaaggatgcagagggtgaaattaccaccattttctgcacctacgatccagatacgctgagcaaagatcctgccgatggccgcaaggtgaaaggcgtgatccactgggtgtctgcggcacacgccttaccggcagaaattcgcctgtacgatcgtctgttcagcgtggctaacccggcggcggctgaggacttcctcgccaccatcaacccggaatcgctgattatcaagcaaggctttgtcgagccaagcctggcggctgcccagccggagaaagcctaccagtttgagcgtgaaggctatttctgcgccgacagccgctattctacggccgatcgcttggtgtttaaccgcaccgtaggcctgcgtgatacctgggccaagattggtgcttaagcttagccaagcctagcgcgtttctttgtctgtttgtctcttgatcggatcttctggtcaagagacatctccagctttactctgaatcctcccttcatgccgtttccctttccgcttactgcccctgattgtgatcacttggcctgcgttcttttaactgcaactccatacccatagtgaaattgtggtaataaactcgccggatttatctgaatcgcacttaatattgcataaattttgagtcgttcatcttggcttattcctattactaaatatcgaaataacggaaggttgcgaccacttatacttatattttctcgctctgcgtattagccacaaatttattgatctgagttagttgttcggctattcttgccgaaaatacaggatggtaaataataaaagtcagcatgctttaataaaggcatagtttattgtgcctttatactaagcatggtttttttctatcaagatagataattccaaggctgatttatactcactatataaggattatgttgtgaaaaagcttactgtttctcaagcaaactcaatcgtcggtggtacctgcaaaacctgttctaccaaatatgtcgcctctggtttcaagtgcaatatggtaacgacctgcaccgacaaaaccggtaaagtcatcagccaggattctaagcctaccgctttggccaattgcggtatcattgagaagtaatactgagtaacggtgtccagttgtccctgcccttactacccttgaaaagatggttattgagcccgagtcacgctcaagcctgtgtccagtaagggcgggtaagcatggatcattattcagcgtttatttcagtgctgatgcgattttttcgtgtcagcctgttttgcaacgataaagctaattgcctggcacttttaggacgcgtttttcatgttcagaacccctctgtttattacgctgtatacgttagtggttattattgtttcatcactcatgacgacagcctattttcactattttgtattgaacaccaatgacgaacagcaaagcctggtcgctttcgataataacaatgttaacaatagtccgatcgaagaaggcaatacccttatcgaactcttctcttatggttgccattactgcgccctgaatgaagaaaacatagataagctggaagcgcggatgcctgccgggagcaagttgatccgtttgcatatcaataatgagcagatgaatggtttggccagtttttcctcattgtttgcgacgttaacggtgatgggcattgaaccgctgcaccgtcagagcgcctacgacgcgattatccgtgacaagatcgatctgagtaaccctaaaagtcgtgatatctggcttcaggaacaaaacatcgatctcgcggagtacacccgtgttagccagaccccgcaggttaaagctttgctgagctatatgaccgatgtcacccgctattacaacatcgacgccacgccgagctttatcgtcaacaggaaatggctggcattgcaggatcgtgagttccccgagtttgctgaccacttgctgtcgttgttacagcatgacaaaccgctggagccctaatgcgtttctttgctgtgtgggcctatctggcatggcgaaatagcctggcaacgctgatgcgtagtatggcgcccttgcgcaaagcacagagaagtgtcgcctgttggctattgcagcacggtgattatcgttggtttcttgtgctggcggcgtggggcagaaggtttcggctaggcgaccgaggggagcgcaggcgtgcttttgtggccgccgccaataagcagtgcttgcttggtgatagccgtaaattggactttgctggcttgagctatcgccggcggctattggatctggctgctacctatgggcaaaacccacagatacaggctcagatggagcgttgtaaagcgcagttgaatgccgtggtggagcctttgcatcaagccggttcgccggtggtgctggctccgttgcatatggtttccgatgtgttggctggaatggttgggggagcggctttcccaggtcaggcaacggtgatcgtttccagcagtgtggaaatctatcaggaaaaagtccgccagctagggaaggtcaatctttcatattgttctatccatgacgatagccgggaaattgccggcaacctgatggcggcgatcatggaggcagcggatcatcggcggaacatcatgatcttccctgatatcacccccgattacaccgtaaataccaatacagcagcaacggcaaaactacattgtcggcttttcgatcgcccagccaatttgcacagcggagtgatacgtattgcccgggcgttatcggcacaggtggttttttattacctgtattacgaccaggaactaaaaatccatattgagccgccggtgcaggctcgcagcctgaaagccaggctgccggaaatcattgaaacgtcgatagcccggcatcctgaagactggctgttatggcccgcgcattcgttattttttatcaatgaataatctggaaattgaagaagtcagatcatggaaaagataatcccgacgcaggtttttcaaggtgaaaccaatgaatgtgggttggcctgcatcgccatgctggcgcagacgcagggcatcgatgccccgctggagaacttgcgtgaacgctatcctgcgtcgcagcacggcacctcgttgaccacgttatgtaccattctctctgagctggccatacccgcttacccggtgattttcgatcatggtgagctggcggagctgccgctgcctgccatttnnnnnnnnnnnnnnnnnggggggagctgccgctgcctgccattttacactatggtgccagccactatgtgctgttggcgtaccgccagggcaactatgtttgcgtgatgaacccggcgataggtcagcagttgttgcccatcgatgcattaaaattggaaatcagcggctacgcgctggtgctggacagtgaaagcccacccgcttcccaggcaaaggcggataaaaagcgcggtacgggtttcaaagccttggagtgcatgagcctgaaagagactgccaggatgccgggtatctatcggctgatggtgctggcctttctgatttccttaaccctgttcatcatgccgacgatggtgggcagcgccatcaatcaggtttactcctcggcgggtgacgccgactttccgtatttctatttcctgctggcattttttgtttctaccctactggccttcgccgtgcgttgggtcacggagcggtttatcaaacgttttgtggtggtcaacagcgtagccggtttctcgcggttactcagtaattcgctcaacttctttgccaaacgtgcaccgggcgacgtgttcagccgcttttccaactggcagctggcgtccggcatcaagatcgagctggataacggcctgcgtaccgattggattatcggcgctatcgcgttaggcgtcatgtgttacatgagcccgctgctggcgatggtctctggcgttggcgttacgctaatgggattgatcagcatctgggccatctaccgcgatcgctattatacccagcagttgcaggtaaaaacggcggagcaaagcgactttattctggaaagcattcagggtttttccaccatcaaatccgccgggctggatagccagcgcaaaagcgtgtttgcccgctacgcgctctctctgtttacctgccaacagcagcagaggatctatgagcaggtcaaaagcagcctgtatcagctgatccgcagcctggagatggtgtttttcatgctgctggcgttgccattgttgaaaaagggtgtcctgacgctgggggagtttttcgcctacagttttgtgcgggagattttcacctcgtatatcaccaaaatattctacgccattttgcagaagaaccagctgcacgtcatcgatacccgtgcgcgggatctgtttccttccaggtcagagcatgaagttgctcccaagacgctcccacagttcagctcccggttgagttttcgccatattgtctttgcctacgatgctcaactgccggtgctgcatgatttgtcgatatcgctgcaacccggccaacggattgccattgtcggtgagtcggggacgggcaaaagcacattactgaaagtgatgaccggcctgatggccccgcagcaaggtgaggtggtggtcgatggtcagccggtcgattatcggcagatacacaccttgttcttcctgcaaagtcaggaagacattctgttcaatgcctcggtgctagagaacatcacgctgtttgatgagaacgtggatgagcatcgacatcagcggattaagcattcccttgaggggctgaacctgcactcggtagtagaaaaactgccgggtggccttaatgccctgatccgtgaaagccatgccggattgtccctgggacagcgccaacgcctgttattggcacgggcaatgtacagtaactgcccggtgctggtgctggatgaaccgacggccaacctggatgaaaatacggcgcatcaggtgatgatgaccttgctggcccattgtcgtgaacagcacaaaacgctgatcaccgtgacacacagcgaaagcgtgctgtcgatgtttgatcgggtttatcgcatggacaatgggagaatgaagcaggttgataccttgttcgcaccgcaatcagacctgacagcggcagcatactcatgaagattaaaatgacagggacgaagctgctgatggctgtgctggcattggccgcagtgagcggtgcggttgtctggtatgccatgacgccaacatcagatagggccctcaatactgccgaaattacccgcggtgatattgagaaaacggtgctggctaccggggtacttaaaccgttgctgcaagtcagcgtcggggcgcaggtcaacgggcaactgcaaaagctgtatgtgaaacagggggatcgcgtcactcgcgggcaactgttggcagaaattgatcccacgttgcagcagaatgcgctgcggaaatccgaagcggcattacaaagcgctcaggcgcagaaacaggtcactcaggcgatgctcaaacagtatcagcaggaactgacccggcagcgcaaaatggatcgcgaaggttccggcataaagagtgagttgcagaaagcccaggcccagctccagacgcaggtcgcccagctaaaggtgaatgatgcccaaatcgttcaggcgcagatggagctggaaacggcccgtgccaacctgggctttacccgaattgtcgcgccgatagatggtgaagtgttggggattgtcaccaaagaagggcaaaccattgtctcttctcaaaccgtacccactattttggtattggcggatgtcgacaccatgtcagtgcatacccgcatatcagaaacggacatcctcaaggttcgcgttgggcagccactgtggttttacgtggttgccgatccgaaaaagcgctatgagagtgtgatgggctcgatccaggatgcgcctggggaggccttgctggacgacaaccttgcgacttcctccagccaacaagcctctgcggtgtattacaacggcgtatttgtgatcgccaacgcccagcgtttgctacgaacctcaatgactgctcaggtgtttatcatcaccgaacaggccaggaatatcctgcgtgtgccggttgccgcctttggcgcacagcgggatgctgaccgctatcaggtgcaggtgatgaatggcaagcagcttgagctacgctgggtccgtattgggcttaatgaccggcagtttgccgaagtcaaagaagggctcaacgagggagatcgcgtggtgctgagctcctcggtgccgggaagcgatcatcatggctgaacatagtgatcctttgatcgccctgagtggcgtctcccgacatttcgtgtccggattgcagacggtagcggtgttgaaatctatctcactcactattcagcggggagaaatggtggcgatcattggcgcttccggatcggggaaatccacgctgatgaatattatcggctgcctggataagccgacgcagggggagatgtccatcaagggaatttccaccccagaggccagtagcgaacagttggctcaattacgcagccagtacattgggtttattttccagcgctatcatctgatgccgtacctcagcgccgctgaaaacgtcgccattccggctctgtatacggcgatgccgacggctgagcgtcagcaacgggccgagtatttactgacccggcttgggttgcagcagcgtatccattacaaaccggctcaactttccggtgggcagcaacagcgggtcagtatcgcccgggcactgatgaacggggcggaaatcattctggctgacgaaccgacgggagcgctcgatcgtgctagtggccaggagctaatggggatcctgcacgcactgcaccaggcaggacacactttgattatcgtgacccacgatcgtgatatcgccaatcaggcacagcgcatcattgaaatcagcgacggtgagattatttccgaccaggccaactatgccgtcgcgccgttggagaccccgccagcgctgccggttgctgtggctactggccgcacaaggttttggcaaagcgtgaaagaggccgtcaagatggcctggcgggccttgttagggcaccgcgcccgggcctttttgtcgatgctgggtatcatcatcggtatctcttcggtggtgtcatccatggcggtcggggaaggggctaggcaaagtattctgaatgaaatcagccagctgggcaccagcacgctggagatacggccgggactaggttgggataatctccgtcccgattttgcgcgggcgctcacggtgtccgatgtcgaactgctggcggagcaaccttatgtcgatagcgtatcgccagtggtcagcaatacggtaaaagcggtacgtggaggcaagcaggccatggtgtcgatttcaggcatcagcaacgcgtattttcgcgtgcagggcctgcatttcctctccggcaacggctttaccgggcgtgatctggacgagcgtgaaccggtggtgatcatcgatccagaactgcgcaccacgctgtttgagccagatgagctgcccgagggggagatcatccagttggcgggtacgccttaccgggtgatcggtattgccgagcgcaaaggtggcaagttcagcggcatgatgcttggggcgtggatgccttacaccgcgttgctggaacgaatgtccggcaatatgccgattgaatcgataaccttgcgggtcaacgacggtatttcattgcgtgatgtgcaaggccgtgtagaagcattattggagcaggcgcatggccagcgtgactttttcacccagaccaatgaccagatgacgcaggccatccgtaaggcgtcggattccatgacgctgctaatcaccgccatcgccggaatttccctgctggtggggggcgttggcgtgatgaatatcatgctggtatcggtgactgaacgaacccatgagatcggcatccgcctgtcggttggggcgcgccctgcggatattatgcgccagttcctgatcgaagcgatggtgatctgctcgctgggtgggctgattggcattattggtgccgggctggccggggtgattttctcctgggtaacgcaggagttttccatgatctttacctggccaccgatggtgctggcctgcgggttctcggcgctgatcggcctggggtttggctttttccctgcgcgaaatgcagcgcgtcttcaccctacggaggcgctggcacgcgaatgatgggtaaactttcctggacactgttattccctttattgctcacgggatgtggctcattagtcaaaagcgactatcagcagcccatgctttctgtgccctccgaatggcggcagcaggagagcggggcaggttatttacagcacggccaacgctggtgggacagctttgacgatccacaactctcgacactgattggtcgggtgctgaccagtaacaacgatctggcgattgccggattgcagctacagcaggcgcggctggctgcggggttaacagataccaacctgacaccggacgtggcggctagcggcggtgcaagcaatgaaaaaaatctgcgcagcaataccaccccgacggagtcttaccgcacctcgctggatctgagctatgaattggatttgtggggcaagctggcgcgggccagagagcaggctcagtggcaggttgaggcctcggagcaggatcggcaaaacaccgcgttgatattgatcggtgataccgcgcgctattactggcagatcgccagcttcaatcagcagatcacgcagcagcagaccgggctggcaatcagtaagcagacgctcgacatggtgcagtcccgcttcgcagcaggcgcggctgggcaacttgatgtattgcaggcgcagcaatcggtgattgagcgtgaaaaccggctgcgtctgttgcaacaacagcgcgaggaggcccgcaacgcgttggccatcctgttcaaccgctcgcccaccgatcgtcaggtagagcgatcttctcgggacgcccaccaggatgtaccgatagccaagatgctgccggttgaggttatcgcccgccgcccggatgtgaaagcggcggaaagccagctgcgcgcggcgttggcgggttcggatgtggctcgcttgagtttttttccgacgctttcgctgaggtgcgtcactcggggctgccagtaatgttttccagcagtggttcagcaacccggccagaacattgggcgctaacgctgccttaccgtttgtggaatggaacaccgtacaactcaccatcgaaaagtcggatctggatgtcaagcaagcggcgattgtgtttcgtcgcacggtctacagtgccttgtccgatgtggataacgccatgacgcagcggcttggctatcagcagcaaaggaaaaaccagcagcagaatctgcagctaggccagcagcgtttagcgctggcgactagccaataccaggcgggagccgtttctttccagactctgctggatgcagaagatgccctgctgaccattgaaaataatctggcggatctgcagtacagctacctcaatgccaccatgaaactctggctggcactgggcggcggtgtggcaaaagaagatgacagggaaaggagaaatcatgaataaaggttcaatgccgcgccgagtggtggtcaccggttacggggcggtgacgccgctgggaatgaatgcagcgcaaagctgggcagcgatcatggattatcagctaggttaccgttattacgataaatccagcgtggggatccagtcgcgttttctggggctgatcgacgaggagccaagcttgaaaggggttcctgcggcgatccgtcgtcgcctgccgcgttttgcccggctggtgttggccgcggcccgtgaggcgatgggcatggcgtttcagggcgacagcccggcggcctattacgatctgctggagtgcggcacgattatgggcagcggctgggcggggcaggatgaaactcatatgaattatgaaggctatctgcgcacgggattggggtcaccttttggctgtttcctgtcgatgccgaatgcggctacggcggcgggcagcctgttctggggcctgcgcggttatcaaaacagcccgattgcggcctgtgcgaccgggacgatcgccatcggtgatgcttttgaggtgatccgcagtggtcgcgcctccatgatgcttgccggagccggggagtcgctgcgtaccgatgccgcagtgtggaacatcgatatccttcgagcgttggcaagcgagcaggaagatatccgcaaggcctgctgcccgttcagcctggatcgcaacggctttgtgctgtcagaaggggcggccgttttgtgcctggaagagcgggaagccgcgctggctcgcggggcgactatccttggtgagatcaagggctacggaaattattccgatgccgtcgattttactgccccagccgaagacaagcttgcccgggtcaggactatcgcgcgagcattggatcaggcgggattggtggcggctgatatcgactatatcaatgcgcatggcacttcgacgccgctcaacgatctgaatgaaacacaggccatcaaactggccttcggtgaagccgcttttagcacaccgctttccagcaccaaatcttattccgggcatcttattgcggcggcgggcagctttgaatccattatttgcctgcaagccatgcaacatcagatgatgcccgcgacctgccacctgacgaatgccgatccacaatgcgatctggattacatcggtgaggggcatcgctccgcagcgttacaaaatacgctgaatctgagctttggatttggcggagccaatgcggccttggtgattgggctggcatgagtatggatctcacttacaccgtgcaagatgctgaagcctgggcagcattttctggcgattacaatccgatccattttgacctgcaacaggcgcacaaaatcggtgtggcgcaactgagcgtgcatgggatgcgtgcgatgctggatatgaaacgccacctgagcacagccctgttggctacagcgccagatcaggatggctgtaccttccgcgcacgtttgcgccagccagtgctgtgccagacgtcatatcagttgcagatagccagcaagggaagctcggtgaccggtgcactgttggacagtaccacgcaggaacgctgttttagcagtacgttgacttcggccccatttttgccatcaagtgctggcgtgaaggaacactcgctgacggcggctgaagtgatgacactggcccgccggtttccaggagaggtttctgatatcactcagacttggggattcctggatgcgttgttatttcggctgttggtgcaatccccggcaacgctggcgacgctgagcgcagcgtttcccgaattggctgccgagacgctgatcgacgtgttcgcgcagatcccggtggtgcagacacaccatgaaacccacttcagcgcccaactttttacccccgatccccattttcaccttgcagagcggctgtactaccagatttcgccaatgttgatcatgggggataaacacagcggcctggtattacgggtggagatccaggctaacacgctgtcgcagccgctgataacaacggcagtcaccttgaaaacctggccgttggtcagtgaataacataaggatataccatggaaaagtaccaacaagtttacctcaccgtcagcgaaatgatctgtgacgccaaagatctggaaatggacgacctctcgccagagatgcccttgcatcagctaaaactcgacagcctggattacgtcgaactgatggttctggccaagcgtgaatttggcgccacgttgagtgccgaaatgtttatcgataaacccaatatgacgctgggtgaactgtgccaatctctggccgaacagcaaaaataagcccatgaccagacaatgggtattagtgaccggcggtagccgggggattggccgcgcgctggtggaagagttggccaaacggtggaacgtggtgttgacctgccgtagcgatcaatcgcccgcagccgaggtgattgaggcctgtgccggtttgccaggttgggtggaaaactgtatttgcgatggcagtgatgaacaggcggtgaacctggtagcaccagatctgttgacccgccttggagcacctttggcggtgatccataatgcgggaattacccaagacagtttgcatatccaacaaacgagcgagcgctggcggcaggtgatcgatactaacctcaatgccgtattctactggaaccgccacctgctgccagccatgatggggcagggcgaaggcgccatggtactgatgtcttcggtaacggggatcaagggcaatgtggggcaaacggcctacgctgccagcaaatcggcgatgataggcctggccaagtcgctggcgttggaggtggcgcgttttaacatccgggtgaattgcctgctgcctgggatcattcacagtgaaatgacagacgcgatccctccggaggcgctgaaggcgctgcgcaaacaaatcccgctgcggcgtttgggcaaggccagtgaagtcgccagggcggcggtatttctgatcggcgatgacagtcgttatatgacaggacagagcctgatcctcgacggagggttaactgcctgacccactggggacgaacatgttcgtcccctacaaattccgcaccaccagtgcacacatgctgcgcttatacctaaaaccaatcctcccttgcgctgtggttagcggtgatcacgcttgtttttttctaagaaataacttggttgtcactgtgtatcatttttcatcatcttgacttatatattcgcgatgcgaattaatatcatttgtagagcgctctcatttttagcgcaaatcggcgcttttcgcttgctgaaacctttcaatccacaggggattggcttttttaagattttattatctgattttattggggtttatttataaatagtgaccttgctcattattgtaacgaaatatcatcaatgtgtgcaccttgtcatactttgacaaatctctgtcacttttcatttgataattcgcgtcgcgaaaaatagtctagctacagtatcaaggccgaggtgaattttctcatccggcacaattttacccgattagggtttttttattagcgaccgtgcagggcagtggtgaacgcaggcgggcgcactttaacgtcaaagtcaaagaggaattttcttatgggtacgcacggtgctcagcgtaaaacgctggcgctcgctgtcgcgggtgcactattaggaagcggatttgtcatggccccagaagcgcaagcagctgggtttattgacgattctacgctgaccggtggggtgtattactggcaacgtcaacgcgatcgcaaagacgttgaaaccggtgattttaaaaccaacctctctcactctacctggaacgccaacctggatttcaactccggctatgcggcggacatgtttggtatcgatgtagcggcgttcaccgccatcgaaatggccgaatccagcgagagtggccacccgaacgaaatcgcgttctccagccgtaaccgtacctatgacgaagattactccggcgataaaagcggtatcagcctgtataaagcggccggtaagttcaagtatggcccggtctgggcgcgtgccggttatatccagccaagcgggcaaaccttgctggccccgcactggagctttatgccgggtacctaccagggtgctgaagccggtgccaactttgactatggcgattcaggtgcgctgagtttctcctacatgtggaccaacaagtacaaagcgccttggcacatcgagatggacgacttccgtcagaacgatcgcaaaaccgacgtttcctatctgcactctctgggtgccaagtatgatttcaagaacaacctggtgctggaggccgcgtttggccaggcgcaaggctacgtgaatcagtatttcaccaaggcgtcttacaagtttgacctggctggtaatccgatgaccaccagctaccagttctacggcgcagaagaccgtatcggtgataatcgcgatccgaacagcatctatgatggcctggcgtggttgcaggcgctgaccttcggttataccaccggtcagttcaactggcgtctggaaggtaccatggtcaaggcggaaggtaaccaaggcttcttcctgcagcgtatgaccccaacctatgcttcctcaaacggtcgcctcgatatctggtgggataaccgttccgactttaacgccaacggcgaaaaagccgtgttcggtggcgtgatgtatgacctgagcaactggaacctgcctggcatggccgtcggagcttcctacgtttatgcctgggacgccaagccaagcaccaacccgatttacgatcagagccagcgcctgagagagagcgcttacagcctggatgcgatgtacaccatgcaggacgggcgcgccaaaggcactctgttcaaactgcacttcacgcagtatgacaaccattccgatatcccaagctggggcggcggttacggcaacatcttccaggacgagaaagacgtcaaattcatcgttatcgcaccgttcaccatcttctaatgcgctccccggtggccaggctgccggggaaaggtcacaggactttaaccatgaaaaaactgatgctgattatcgctgcggttgccgggcttagtgcctgttcgcaatcggtcgcgccaccggaagatgccaaactgcgccaggcctacagcgcctgtatcaataccgcggaaggttccccagagaaattacaggcctgccaggcggtgctgaacgtgttgaagcaagagaaaaagcaccaacagtttgctgagcaggaaactgtgcgagtgctggattatcaaagctgcatccaggccgcccataccggcaatggccaggcgtatgacgccaaatgcggcaagctgtggaaagaaattcgcgcaaacaacaactgattacgcaagaggttgcagatgaacaagtttaagatgagtgctctcgccgccctgacggctaccgttgggctctttggcagcgtaggttctgccatggccaaccagcaggtggttgatcaactcagccagttgcaggtcaatctgaagatgttggacaaccgtgccgctgaacacggcgtggactgtgccaagctgggtgccgactgggcgtcctgccataaggtgctgatcaccttgaccaacggcaatcaggaaatcaaagataaagattgggcgatctatttccacagcccgcgccagacgctgaaggttgataacgaccagttcaaaatcacccacattaccggcgatctgtataagctagaaccgacagacaaattcaccagcttcccggccaatcaggcggtggaaatcccgattatcgctgaatactggcagctgttccgcaccgacttcctaccgcgttggtatgccacttccggcgatgctcagccgaagatcctgtcgaataccgatactgatgatattaaccagtttgttgccccattcaccggcgatcagtggaagcgtaccaaggatgacaacaacattctgatggtcccggaaagccgcttcaccaagaaccaggatctgaaagtgttgccgatggcatcgctgcgtgggcaaatcatcccaaccccgatggaagttaaagtccatgcgaaggatattgacctgagcaaaggcgtggcgctggatctgagtgcgttgaccaagccagcggcggatgcggcggccgagcgttttgccctgctgggcattgagagccaggcgagcggttatccgatcaagacggatatcaagccagcggcattcaaaggcgatcaggccgttccaggtgcctaccaactgaagatcggcgagaaaggtgccgaaattgtcggtttcgatcagactggggtgttctatggcctgcaatccatcctgtcgctaatcccttcggatggcagcaagaagattgcgacactggatgccaaagatgcaccgcgcttccaataccgcggcatcttcctggacgtggcgcgtaacttccaccacaaagacgccgtattgcgcctgctggatcaaatggcagcctacaagctgaacaaattccacttccacctgacggatgacgaaggttggcgcattgagatccctggcctgccagagttgaccgaagtgggcggccagcgttgtcatgacctgagcgagaccacctgcctgatgccacaatacggctctggccctgcaccgcacggtggcttcttctcccgtcaggactatatcgacatcgttaaatatgctcaggcgcgccagattgaagtgatccctgagatcgacatgccggcacacgcccgtgcggcgattatttccatggaagctcgttacaagaaactgcttgccgaagggaaagagaaagaggccaaccagttccgcctggtggatccgaccgatacctccaataccacctcggtgcagtacttcaaccgtcagagctatctgaacccatgcctggattcctccaagaacttcgtggacaaagtgattggtgaagtggcccagatgcacaaagaggccggtcagccactgaaaacctggcactttggtggggacgaagcgaagaacatccgtctgggcgccggctataccgacgtgaaaaacccggaagcgggcaagggcatcctcgatctgagcaaagaagacaagccgtgggccaagtcgcaggtttgtcaggccatcatcaaagatggcaaagtggaagatatggaacacttgccaagctacttcggtctggaagtcagccagttggtgaaagcgcacggcattgacagaatgcaggcgtggcaggacggcctgaaagatgccaaagactcgaaggccttcgcgaccaagcatgtggcggtgaacttctgggataccctgtactggggtggtttcgattcggctaacgactgggcgaacaagggttatgacgtggtgatctctaacccggactacgtctatatggacttcccgtatgaagtcagcccggacgaacacggttattactggggcacccgcttcagcgacgagcagaagatcttcagctttgcgccgaacaacctgccgcagaacgccgaaacctcggttgaccgtgacggtaaccacttcaccgccaagagcgacaaaccgtggccgggcgcatatggtctttccgcccaactgtggagcgaagtggtgcgtaccgatcagcagatggaatacatgatttacccacgtgccgtgtcgcttgcagaacgtgcatggcaccgcgccagctgggagcaggattacaaagctggccgtgagtataaaggtggtgaaacccatcaggtcgataccaaaactctggatcaggactggctgcgctttgccaacctgatcgggcagcgtgaactggccaagatggataaagcgggcgtgagctatcgcctgccggtcccaggggcacgtatcatcggtggcaagttggaggcgaatattgctctgccgggcctgggaattgaatattccaccgacggcggcaaacagtggcagcgttatgacgataaagcgcgcccagcggtggcgggtgacgtgcaaatccgtgcaatcagcccggatggcaaacgcttcagccatgccgagccagtgaaagcgtaagtgaaaactccgcccacctgcgtgtcggtagaggggcggagatagtgcaaggtgagagcaagctgcaattgtgataaatgagtggatattttccccgggcctgtccggggatttttttgcctgtcatctgggcataaaaaaaccgccgtgtaggcggttttcgcgttctggcgggccagaatcagttcttgttgtgcagcgtttcgttctcgcggcaatcaccggtttcacagtggccgtacaggtacaggctgtggttggtgagcttgataccgtgttgcttggcgatatcgcgctgacgcacttcgatggattcgtcgctgaactcgatcactttgccgcagtccaggcaaatcaggtgatcgtggtggtgttgctgagtcagttcgaaaaccgacttgccaccttcaaaattgtggcgggtcacaatacctgcgtcgtcaaactggttcagcacgcggtataccgtggccaggccaatttcttcgcccatatctatcagttttttgtacagatcttccgcactgacgtgatggcatgccggatcctgtaatacttccaggattttgagtcgcggaagagtgacttttaagccagccttcttcaatgcggagttgttatcagtcatgcggattcagtcctgttactatgctaatcaagttgaggcgttctcgcctatggcatcggttggcacaaagcgttaattgcgtctcattatagaaccggttgccgcaaatagaaaccgccggttgttaacaaacctatctttgcacgtttacagggtaatcatgcaaagctttgatggatgggataaaccgatatctcagtctaccgtggcgaggtaggaagttacaaacttgtagcttctattgctctaatccgtgatgccgataacagaagggcgcgctcaacggcgccccttccatgtgttacgtatccgccggggcagaggctcagccgacgatctcggccaggctcagctcttcactgatttgcttgacccaggcatctacgcgttcgttggtcagctcaggttgacgatcttcgtcaatggccagtccgacaaagtgatcatcgtctgccagacccttggaggcttcaaaatggtagcctttggttggccagtggccgacgatggccgcaccgcgtggctcaatgatgtcgcggatggtgcccatcgcatcgcagaaatattccgcgtagtcttcctgatcgccacagccaaacagcgccaccagcttgccgttaaagtcgatgtcttccagcgtcgggaagaaatcatcccagtcgcactgggcttcgccgtagtaccaggttgggatgccgagcagcaggatatcaaacgctgccagatcttctttgctgcttttggcgatgtcgtggatttctgccacatcgttgccgaacttttgctgaagcgtcttttggatcatcttggcaatgttttcggtattgccagtgtcgctgccaaagaaaatgcctacatgagccatagtaaagataaccttttaattcaaatgaatgtgttgcgtaaacgcggcctgaggcgctgccaagggcaggcttgctcagccgtaaatgcgtatcatgccagaaatttgccctgaggttttatcgcgtttatgcgatgcctctgcggaggtggaaccgatctggcgtcatccttaacgccgtgccgcgcgtgcggcagcagagatcagtgttctggctgttcttctgccagttgggccaacagcatttgttcgatcaattcgctgcggctgatattgcgctggtcggccagtttgttgagagcatctaccgcgtctgcgttgattttcagctccacacgccgtaatccacgcactttgtcccgtcgtagctgattgcgcttattaattctaagctgttcatcacgggaaagcgggttggttttcgggcgccctggacggcgttcatctgcgaacagatccagcgtcgtgcgatccgtttgttcttttgccattgttgcgctactgcaagggagtttgcatcaaaaagcggtttacgcttccagacggttcgatttacacaattcgggccaataaaccctaacccaaattcacccccagccaagcgcagtttcacacctggacagggtggcaaaattatagcgcgccatattaccccagcagatggagcgacgacaatgcctaacttagccacaaacgcgctaagctattctctctagcgcgttttttcgccacttaagctcagggctggtcaataaagcggtggattgcccgtaatacggcgtccggtttttccgcatggacccagtgaccggagcctgcaaccacataggcgcgcgcctgcgggaactggcgggcgatgtcatcgcggtagctatcttgcacgtaaggcgagaggccaccacggataaatagcgtcgggtgccgccagggtggaacctcctgccagccgataatgttctcatactgctcgatcaacaccggcaggttgaaccgccaactgcctgcatggaaggatttcaacagaaactggatcacgccttcttcatccagcgtggcccgcatgagctgcgcagcctgctgacgctgagtgatacccgcatcggtgacggcttgcagtgcggtaaagatctggtcatggcggcgagtgtcgtaatccaccggggcgatatcgatcgccaccagccgttcaatccgctccggggctagcgcggtcaacgccatcgctgctttgccgcccattgagtggccgattacgatggctcgctcgatttgcaagtcgtctaacagcgtcaacagatcctgcgccatcgccgggtaggtcatctccgccgcgcgcggtgacagcccgtgattgcgcagatcgaccttgatcaccgtatgctgctggttcagatcgcgtgccagcacgcccaggttatccagattgccaaacaggccgtggatcagcacgatcggtaggctcgctggcgtggcagcctctgcggccaataattgataatgtaatttcatggtgaagttcatgatcttgagataatgagttaggttaacatggctagagagattattggttggtccgcagaattttgccgatatttcatggtatggtgagggcttggcggccaaggcggttggctaaagtctgcttttgccgtttgggagaacattgtagtgttcgcacccgcgcttttaaccttataatcccatggcttgaatgcaccaattggcttcaggttcataagtagaaaaaacgtactggataaagatgaaaactattgaagtcgacgaagaactttaccgctatattgccagccacacgcaacatatcggtgaaagcgcgtctgatattttacggcgtatgttgaagtttaccgcaggacagcctgtgcgcacggctcctgtggttgccagtggccaggcagagccgtcagcggctgccgttgcagcacagcgtccacgcgatcgcgtgcgtgcggtgcgcgagctgctgctatcggacgaatatgccgaacagagcaaagctgtaaatcgttttatgctggtactttccaccttgtacaccctcgatgcggcgggctttgccgcggcaacggattcgttgcatggccgtacccggacctattttgctggcgatcagcaaacgctgttggccaacggaacgcataccaagcccaagcatgtgccaggtacgccttactgggtgatcaccaataccaataccggccgcaaacgcagcatgatcgaacacatcatgcaggccatgcagttcccagcggaactgatcgagaaagtttgcggcaccgtctaatttagcgaacagcccgtcacggtggccgtaagcgactcattgcccggccacagtactggcattttagggagtagtcgatggctaatgacccacgtgccgggcaacccgctcagcaaagtgatttgatcaacgtagcccagctgacgtcgcagtattatgtgctgcaaccagaggccggtaatgctgcacacgcggtgaaattcggtacctcagggcatcgtggcagcgcgcttcgtcagagctttaacgaagcacatatcctggcgatcgctcaggccattgccgaagtgcgtcgtcaacagggcaccactggcccttgctacgtgggtaaagacacccatgcgctgtccgaacccgcctttatttccgtgctggaagtgctgaccgccaacggcgttgacgtggtggtgcaggaaaataacggctttacgccaacccctgccgtgtcacacgctatcttgtgcttcaaccgcaaagggggcgcgcaggcagacggcatcgtgattacgccttcgcataacccacctgaagacggcggcatcaaatataacccgccaaacggtggcccagccgataccaacctgacttcggtgattgaaaagcgtgccaacgaactgctgagcctcaagctgcagggcgtacagcgtcaatcgctggaaaaagcctggactggcggccatctgcatgcgcaggatctggtgcaaccttacgtagaagggctggtagatatcgtcgatatgcctgccattcagcgtgcgggcctgaaactgggtgtcgacccgcttggcggttccggcattgcctactggcagcggattgccgagcactataagctggatctgacgttggtgaatgactccatcgatcagaccttccgctttatgcacctcgaccatgacggcatcatccgcatggactgctcgtccgaatcggcaatggcgggcctgctggccctgcgcgacaagttcgatctggcgtttgccaacgatccggactatgaccgccacggtatcgtcacgcctgcgggcctgatgaacccgaaccactacctggccgttgccatcaattacctgttccagcatcgcccgcaatggggtgccaacgttgccgtgggtaaaacgctggtttccagcgcgatgattgaccgcgtagtggccgatctgggccgcaagctggtggaagtgccggtcggtttcaaatggtttgttgacggcctgttcgacggtagcttcggcttcggcggcgaagagagcgccggggcttcgttcctgcgcttcgacggtacaccttggtctaccgacaaagacggcatcatcatgtgcctgctggcggcagagatcactgcggtcaccggtgaaaacccgcagcatcattataacgatctggccaaacgcttcggtgcgccaagctacaaccgtatccaggctccggcaacctccgcacagaaagcggcgttgtccaaactatcaccggaaatggtcaaggccagcaccctggcgggtgatccaatcaccgcgcgtttgacggcagctccgggtaacggcgcttccatcggcggcctgaaagtgatgacagacaacggctggtttgccgctcggccatcgggtaccgaagaggcttacaagatctactgtgaaagcttcctgggtgccgagcaccgtgagaagatcgaacgcgaagcggtcgagatcgtcagcgaagtgttagcttcagccaagtaatctctccctcgataatgaaaaggcgctgtttttacagcgctttttttatgcctgtaatttagatatatctaatttcaggttacctcttgcgcatttagatatatcgatctagattagagccatcgacgcagtttagatatatctaaatgcgtcgatgctcatatcatcaatcaagaggtaacaaccatgatgtttaatcgatttgcacgtcaccacgaccagcgggaagaggggcattgccaccaccgccgtggcggccgtcatcattttgctggccgcggggaacacggccgtggtggtgaagaacatggccggggcgggcgcgggcgtcatcgcctgtttgaacacggcgatctgcgtttggtgctgctggcgctggtagagcgtaaacctagccacggctacgagctgatcaaggcgatcgaagaggcttcttccggcttgtatgtgccaagcccaggtgtgatttacccaaccctcacgttgctggaagagcaggacttcctggaaccggcagtggctggcaatggccgtaagagctaccaaattaccgaactcggcaagcaggagttgcaaaaacatcaggcggccatcgaagtgatttttgcccgcctggctggcgctgggcgtgaccatcgccatgagggcaatctggccgaagggatctccgaagtgatgaatcgcctgcgctacctgctgcgcggcaacatgatgcgtgcggatttgtctcaggagcaggtcgggcgtatcaatcaggcactgctgaccgccgtggaggctatcgaagccgaaatggtatcgccaaaacagccacaggaggataactgatgccaggccaccgtttccgcattaccgtagaagccctgacagaccgtaaaggcgaacccgtcgacaagccggagttggtgtttgaggtagaaaatcacgacgatattctggccattgttgagcgcattcaagggcgagaggatctgaactttggcgaacagaacagcgcggcctttgccgtcgggctcaagctgttctccgaagtgatgatagaaaaccgtaagcatccgctgtttgagccactgcgtgactcgtttaaggcgtttatgatcggactgaaaaaggggccaacatcgtcgcaggattaaggcataaaccgatagccgacgccggtctcagtgagcagatgcctgggccgcgccggatcggcttccagcttttgccgcagatggcccatataaatgcgcagatagtggctgtgttcgacgtaattgggtccccagacgtggctgagtagctgccgctgggtgatcaccttaccggagttggccagcaactcggacagtaaacggaactcgatgggcgtcagatgcagatcttcaccgttacgcaagacgctacggttgatcagatcgacggtgatatcggagaagctgaccaacgggctttcctgttggctattggcgtggcggcgtagcgcaacccgcacccgggccagcagttcaccaatgccgaacggcttgctcagatagtcatcggcccccgcatccagcgcggcaatcttgtcctcttcggcatggcgagcggaaaggacaatcaccggcacggcgctccattggcgcagatcgcgaatgtagtccagcccgtcgccatcgggtaaccccaaatcaagaatgatcagatccggcttgcgcgtgccggcttctatcagcccacgctgcagcgtttcactttcaaatacccgtaacccttcgctctccagcgcggtgcgcacgaagcgacggatctctttctcgtcttccacaatcagaatgttagtcggcgatgtggtcacggggcctctactctttggttacaagtcaaaatctgctccatccagttcgggtggcttttccaacggcagcataaagtggaaactggctccgccttcggcgcggttctccgcccagatgcggccgccgtgtacttcaataatggcacgacaaatcgctaaccccaagccgacgccggggatcgccgactctttattgccacgggagaatttgtcaaatatcagttgcgtctgttcctctgggatgccggggccattatcccaaacctccacttccagccagtcctttactgcgtgggcgcggatcccgatgatagcatcggcaccggcatatttattggcattttccaccaggttggtgaacacccgctctaacaggctgccatcacagttgatcaacaccatctctggcggcaactccaccttgatctcgtgcaataccagtagcggttccagcatatgcagtgaggcaccgacgatctcttccagcgattgccactctttacgcaggttaaaaccaccggactgaatgcgtgccatatccagcagattgtttaccaggcgggtggtactgagcacctgctggcggatttggctggcctgtggggcgtggctggagccttcggtggccagatccagcgtcaggatctctgcctgaccaaacagcacggtaagcggagtacgcagatcgtgagaaagggcggccagcagcgagttacgtagctgttcgcgttcggcatccagcttggcctcttcggcgctgcgggccagatgcaggcgctccagcgcgctggcgatcagcaccgcaaaggtctgtaacagccgctgttgctccggcaccattaactggcgcacattgttcggctcaattgccagcaggccaaaggtctgtttggaggtgctgagcggcagcagttggtacggcacaccgggcagggtgtcggtaccggccccggcgggcaagcctttgccatagctccagcgggcgatggcctcatccaccgacagcaagccgccttcttcacccaccatctgttgcagggagccatcctcctgcggcagcagcagtacggtcttggcctggaagctgctggagataaaatgacggctggttttggcaatatcttctctgctcaacgcctggctgagcccacgggacatctcatataaatggcgcgcccgttgttcgcgatagcgtgccacccgggcctgataacgcaccccggcggtcagattaccaatagtgataccgacggtcagcatcacggcaaaggtcagcagatattgcatatcactgacggcgaacgaccattcgggctgtacgaagaacaaatcgaagctggcgacgttgatcaccgcggccagcaccgaaggccagcggccaaagaacagggcaacaatcgccacgcccagcagataaaccatcaccaggttggcggaatcgaagcccggcagtaaccattgtgacagcaacgtgatgatggcgcataaagctacggcaacggcacagccccgcaattggaaacgccatttttcgctaaaggcgcgattatcgtgctcttttatctgcggctggggcgtatcgttttccagcgctacaatcaccagatcgagatccggcccaagctggccaaggcgatcggcaaagctgccgcgtagcttccagcgctgttcgccacggcggccgataatgattttgcccaggttatgttcccgggcatagcgcagtaccgcacgttcttcagaaggatcggaaagggtggcggtttctgcccctaattcttgcgccagccgcaaggcgcgcaggatggctcgccgttgattttccggcaggcggggcagcttggggggttcaacatatacggcatgccagtntgcagcttgggggtttcaacatatacggcatgccagtggcaaccgaggcgcgccgcgagccgtgctgcgatgcgcaccagcttttcgctaccgctgttatggccgacgcacagcaggatgctgtcccgggtatgccagaccttttcacgcccctgattatctcgaaaggcccgcatttggtcatcaacgcggtcggcagtgcggcgtagtgccaattcgcgcagggcgatcaggttacctttacggaagaaatgctcgatggcgcgttcggcctggcctgggatatagaccttgccttcgttgagccgctgacgcagatcgtctgggggcaggtccaccaacaccacttcggtcgcttcgtcaaacacgtggtcaggcacggtttccctgacccgtactccagtgatgccgccgacgacgtcgttcaggctttccagatgctggacgttaaccgtggtcagcacatcgataccggcatccagcagttcgtccacgtcctgccaacgtttgggatggcgtgaaccctgggcgttactgtgcgccagctcatccatcaggatcagggccggatggcgtgccaaagcggcatcgaggtcgaactcctgcacctggcggccacgatgttggatgcgttttgctggcaggatcgacaacccttgcagcaacgctgccgtttcctggcggccgtgggtttccaccacgccaatcagcacgtctagcccctgcgcccgttgccgttgagcttcctgcaacatggcgtaggttttacctaccccggcgcaggccccgaagaagactttcagtttgccgcgcggcttttcattggctaacgccagcaggctgtctgggtcggggcgttgcagttcgtcatccaccatcagagttccttgtttacccatgcaaagcgggttcggcaatgccgaaccctttatttagctactttttatcacgtcttcagttatttcaacgcatccagcgccatattcagtttcagcacgttgaccaccgattcccccataaaattgggcgtggcgcgatcggtgttttcatcaatcagcttggcaatctgctcctgtggcaactgacgagcgttggcgacacgcgctacctggtacttggcggcggccagcgaaatttgcggatccaggccactgccagaagcggtcagcagatcgaccgggatcggcccgctcatcgccgggttagcctggcgcaactgcgttgcccgctcaccgatcgctttatccagcgccgggttggtggcggccagattactgccgccggatgccatcgcattataggccgaatcgctggtggcagaagggcgaccccagaaataacccggttgggtgaagttctggccaatcaacgccgagccgaccgctttatccccttgatagagcaacgagccgttggccgccccgctgaacagcaactgtgacagcccagtggtgagtaatgggtaagcgataccggtgatcgccgtcagcaggatcagcataaccagagaaggacgtaaataagacatcataaattcctcgttatcttagccggccatattcagcgcggtcagcagcaggtcgatcagcttgatacccacgaacggtaccagcaggccacccacaccatacagccacaggttacggcgcagcagagccgcggcgctcattgctttgtaactcacccctttcaacgccagtgggatcaggaagacgatcaccagagcgttgaagatcaccgccgacataatcgccgaggcgggggagtgcaactgcatcacgttcagcgcattcaactgcggataggttgccgcgaaggccgccgggataatggcaaagtacttcgccacatcgttggcgatactgaaggtggtcagtgaaccgcgcgtcatcagcatctgcttaccgatatgcaccacttcgatcagtttggtcgggttggagtccagatcgaccatgttgcccgcttccttggccgcctgcgtccccgagttcatggcaaccgccacgtcggcctgtgccagtgcaggggcgtcgttggtgccgtcgccagtcatcgcaaccaggcgtccttccgcctgatactgacggatcagcgccagtttggcctctggcgtggcttccgaaaggaagtcatccacaccggcttcagctgcgatggcggcggcggtcaggcggttatccccggtgatcatcaccgtcttgatgcccatcttgcgcagttcggcaaagcgttctttaatcccgcctttgacgatgtctttcagcgccacgacccccagcacgcgtggcccttcggcgaccaccaacggcgtaccgccggtacgagcgacgctttccaccaactcatctactgcacgtgggaagtggccattgttggattcgacgtggcggcgaatggcgtccaccgcccctttacggatcatccggtcctgcacgttgacgccgctcatgcgggtttgcgcagagaaaggcacgaaggtggcattcaacgcctgcaaatcgcgttcgcgcaggttgaagcgctgcttggccagcaccacgatactgcggccttccggcgtttcatcggctagcgaagagagttgggcggcatcggccagctcttgctcttttaccccaggtgccggcaggaattcggatgcctgacggttaccgagggtgatggtgccggtcttgtccaacagcaatacgtcaacgtcaccggcggcctcaacggcgcgcccgctggtggcaatcacgttggctcccagcatgcggctcatcccggcgacgccgatagcggacaatagcccaccgatggtggtcgggatcaggcagaccagcaaggccaccaacacggtgatcgacactatgctgccgctgcctgcggcttccacgctgtattgcgagtaagggaacagggttgcggttgccagtacgaacacgatagtcaacgccaccagcaaaatggtcagcgccacttcgtttggggttttacggcgtttggcaccttcgaccatggcgatcatacgatcgaggaaggtttcccctgggttgacgctacactgcaccaccagccagtcggacagaatacgcgtcccgccggtcacggaggagaagtcaccaccggattcacggatcaccggtgcagattcaccggtgatggcgctttcatcgaccgatgcgccgccttccagcacttcgccatcgcaagggatagtatcgccagcttctaccagcacgatatcccctttacgcaggctctcggccgagactttctcggtggccccatcacgcttcggtgtggcgagtttcttcgcccaactggttttcttggtgcccttcaggctttctgcctgagccttgctgcgtccttccgccagcgcctcggcgaagttggcgaacagcacggtaaaccacagccacatggcgatgctgccggtaaaggccgcgctaccttcggcgttgcctgaaagcaccgccagccaaatgactgaagtcaggatactgccgaggtacaccacgaacatcaccgggttacgccactgaacgcgtgggtccagctttttcaccgcatcgatcagcgcggtacgcatcagtgccggttcaaacagtgcgcgttgtttgcgagtcatcttgttcttctctctgttatgactgttaattggccaaccacagttgtaaatgttcggctaccgggcctagcgccagtgctgggacaaaggtcaaggcaccgaccagcaggatggtaccgaccaacaggccgataaacagtggtccgtaggttggcagagtgccgttgcccgccggttggcgttttttgacacacagcgaacccgcaatggccagcaccggcaggatcaccccaaagcgaccaataaacatcgcaaaggccagcagcaggttgtagaacggcgtgttgacgctcagaccggcaaaggcgctaccgttgttgttggctgccgaagagactgcgtacagcacttcactgaagccatgcgcccctgggttgaggatgccagcacgaccggcgtcggtagcaatcgccaacgcggtgcccagcagcaccaaggtcggcgtcaccaggattgccagtgcggtcatcttcatgtcataaacatcgatcttcttgccgagatattccggcgtgcggccaatcatcagcccggcgataaataccgtcagcagcacgaacagcagcatgccgtacaggccggaaccgacgccgccgaacacgacctcgccaatctgcatcagccacatcggcaccatgccacccagtgcggtaaaggagtcatgcatggcgttgaccgcaccgcaggaggccgcagtggtcaccaccgagaacatgctgctggcgagaatgccaaaacgggactctttaccttccatattgatgttgctgctactgccaagcgtgctcagatgcgggttaccagccagttcagcattcatcaccacgatcaccgcaacgataaagatcagcgccatggcccagatcagcgcgtgaccctgacggttttcaccggccacctgaccaaaggcgaagcacagggcgcaagggatcaggaagatcgccagcatctgcacaaagttggtcaatacggtcgggttttcaaacggatgcgccgagttggcaccgaagaagccaccgccgttagtaccgagcatcttgatcgcttcctgagaagccactggtcccattggcaaggtctgctgtgctccttccagcgtggtgatatgcaggtaaggcaggaagttctgcaatgttccctggctgacgaagaacaacgcgatcagcagtgacagcggcaacaacacatacagggtaatgcgcaggatatcgatccaggcgttaccgatggtggcgctggaacggcgtgcaaaggcccggatcagggcaaaggcaacggcgataccggtggcggcagacaggaagttctgtaccgtcaacccggccatctggctgagatagctgagggtattttccccgctgtaggcctgccagttggtattggtgacgaagctgacggcagtattgaacgccagatcccaagataaaccggggaacccttgcgggttgagcggtaaggaaccctgtgccatcagcagcaccaacagcagcaccaaaccgaggatattgaaccacaggatcgccagtgcgtattgccaccaggtcatctcggcggtgtcattaccgcagcaacgccagacggttgcttccacatggcgcagcaccggtagcggctctccctcgatcaggcgagccataaagctgcccaggggacgggccagcaccagaagcaccagcataaagctggcgatcaacaagaaggctgaagctgccatcagaagtcctccgcattaaacagggcataaaccagatagcccaacagcagcagaaccaacagcgcaccaccaataacgctgaaactcacgggacacctccagaggtgttgtttttgatagcctgagtgtagggagggcagtagaaagaagatgaaaaaatagcggggacgggtgtaaaaaaagtataaaaatgattgaaataacggcaaaaattggcggttttatacgcagcaagggcgtggggggatggggtgttggcataaaaatccgtttaacgaccccaacaacgccaagaaaccacaatgtaaccaatgttaagttagttattaaccttgatgtaacaaaattacgttgtggaggccttttttgtgctctttttgcgcattttagtggtcggatgagttgtaaaattacaccctatgcggtaatattttgctcagtttccaattggccatcatttatcgttttgcattgcgtcgggtcctgacaacctggcgcggatgtttttaaggaggttcgtatgtctaactaccaagcctatccgttgcatcgggtcctcctgcgccgtagcgcagtgattctggtcggtgttcttgccttgccggtgatgctgttccgtgccgatcgcgcacgtttttacagctatttacaccgcgtctggtcaaaaaccagcaataaaccggtctggctgcaacaggcagaaacggcgtcctgcgatttttattaatcctggcccgtagcaatactacgaaccctcgcccctttggcgggggtttttgcgttttaagccgcagtaacgcattaactcctctacacttctagcattaacccgttggtgggagacaagatatgagcaacaagatccctattggaatcagcgcctgcctgttgggcagtgcggtgcgtttcgatggtggccataaacgctgcgaatttgccgtggaacaattggcgccctatgtcgcgtttgagccgatttgtcccgaaatggcgattggcttgccaacgccacggcctgcgctgcgtttggttaaaaaccaacagcagacgcggttgctccacagcaatgaccccaatgtagatcttaccgaacggatgcaacagttctctgaactgcgggttagccagttgcaacatttatgcggctacatagtctgcgcaaaatcgcctacttgcggaatggagcgggtcaagctctgggacgagaacggccagggggcgcgtaaaagtggcgtcgggctgtttgccgccgagctgctccagcaaatgccgtggttgccggtagaagaagacggtcgtctgaccgatcccgtgctgcgggaaaactttgtcgaacgggtgtttgccctttatgaactgaatatgctgtggcgccaggggttaactcgtggtgggctgatcgcttttcatagccgttataaactttcactgttggcgcattcacaaccagagtaccgggagctggggcgtttcgtcgcggatattgaacgctgggagtcgctggacgcttttgcggtggaatatcgccaacgcctgatgaggctattgcaacacaaggcgacacggcgcaaccacaccaacgtcttgatgcatgttcagggttacttccgccgccagctcagcagctctcagcgccaggaactggccaggcttatcgatcactatcgccaagggatgcaaccgctgctggcaccgattacgctgttaaaacattacatggccgaatatcctgatagctatctggcgcaacagcgctattttgagccctacccggaggcgctgcgcctgcgctacggccattaacccgcaaggagtgttatgaccacgcatctggtctggttgcgtaacgatctgcgcattacggacaataaagccctctccgccccctgtagcgatccgcaagccaaggtgatggcggtatttatcgctacacccgcgcaatggcggcagcacaatatggcaccgcgccaggcggcatttattcacgctaatctgctacaggtacaagcggcgctggcggctcggggcattgaactgatttgccatcagggcgacgattttgccggttcggttaactggctggtggagttctgccagcgccagcaggtctcggccctgttttacaaccgtcagtatgaaatcaatgagcgtcaacgtgacgcccgccttgagcaggcgttggccgggcaggtgagctgccacagctttgatgatagcctgctgttaccccccggcagcgtgcaaaccggcaacggcgagatgtacaaggtctatacgccctttcgcaaagcctttatccagcggttgaccgagtccgatgtgagctctctgccggccccacgcccgcgtggggaagccgttggttttaccgccgcggcggcgttcgattatcccttggctgaagtgggagagggctatcccacaggcgaagaggctgcattgcagaggctgcgtgctttctgccgcgagcaggtgcaagactatgccacacagcgcgatttgcccgccattgccgggaccagcaatctgtcaccctatctggctattggcgttatctccccgcgccagtgcgtcaaccgtctgcgcgtcgagtgccctgatgtgctggaagatccgcaaagtggtgctttctgttggcttaatgagctgatctggcgagaattttatcgtcacctgatggtggcgtatcctgcgttatgcaagcaccgtccctttatcgcctggacggataaggtatgctggcaacgcaacgacgcggcgttactggcctggcaacagggcaataccggttacccgattgtcgatgctgccatgcgtcagctcaatcaaaccggctggatgcacaatcgcctgcggatgatcgtggccagcttcctggtcaaggatttgctgatcgactggcgtgccggtgaacagtatttcatgtcccaattgctggatggcgatctggccgccaacaacggtggctggcagtgggccgcctctaccggcaccgatgctgcaccttatttccgtatctttaacccgaccactcagggcgaacgttttgatccaaaaggcacttttatccgtaaatggttgcctgaactggcggatgtaccggacaatgagctccatcaaccccatcgctgggcggaaaagcagcagcaggttctgaattatccgccgccgatagtccaacaccagcaggctcggctggagacgttggcggcttttgaagcggccaagcgagggggactttaaagtaacagcaaggagcttcctgatgatgaagaaactactggccctgtgcctgggcggctattccgcgttggccgtggccggttttgacgtagtggcgctgggcgttgacggtggcgtcagcgacggcaatctgacttcttatctgatccgcagtgatagccagacgcagtatctggcactggatgccgggacgctgctgccggggattgccaaagggctggaaaagggtagttttcctcaggtcacgcccgagctggcggctccctacaccccacagggctatattttccgtcaactgattggcggttacttcattagccacggccatctggatcacgtcgctgggctgatcctcggttcaccgcaagacagtaagaaaaccgtttatgcgcaggccgataccgtattgacgctgcgcaatcactattttaactggaaagcctggcccaactttaccgatgccggtaatggctcgcggctgggcacttaccgtttgcaaacggtacgcccgctgcagcgtgtcaccctgggcctgaccggtttgagcggggtgatgtacccccttagccacgatcgctatccctcatcgatgttgctggtggccgaccgtgaaggatcatttgcctactttggcgataccgggccggacgcgctggagcagtcacgtaatttggatagcgcgtggcgcgagctggggccgctgattgagcagaagaagctaaagggcatgattatcgaaacctctaacccgaacgaggtggatgataaacacctgtacggtcatcttaccccggcctggctactgaaagagctgaaaaacctacagcagtacagcggcggagagggatcgttaaaagatctgccggtgatcatcagccacatcaagcccagcctgaaacagggggaagatgcgcgtgctaccatcaagcaacagctggatcagggcaacgatctgggggtgaaatttatcctgatggaacagggcgatcggcaacaattttgaatgagagtgagatgactatgcataacctagatctggaacatctgatcaacagcgaactcaactgtgcggccttccaggactacgcgccaaatggcctgcaggtggaagggcgggcgcatgtgcagcgcatcgtgacgggagtgacggcctgccaggcattgttggatgcggcggtggaacatcaggccgatgccatagtggtgcatcatggttacttctggaaaaacgaagcacccgcggtgcgcggcatgaagcgtaaccggctgaaaactctgttgagcaatgatatcaacctgtatggctaccacttaccgctggatgcacacccggaactgggcaataacgcgcagttggcaaaggcgttgggcatccgcgtgatcggtgagatcgagcctttggtgccgtacggagaatttgagcaaccgctcagcgcaggtgaactgcaacagcgtatcgaaagccgtcttggccgtgcggtgctgcactgtggcgataatgctccgcaggcaatccgtcgggtggcctggtgtaccggtggcggccagggatttatcgacagcgctgcgcgatttggcgttgatgcgtttatcagcggagaggtttctgagcaaaccattcatacggcgcgggagatgggggtgcacttttttgccgccggccatcacgcgacggaacgcggtgggatcaaggcgttaggcgagtggttagcgcaacatcacggctttgacgtcacctttatcgatatccccaatccggcctgatttgcctatgggttcggtaaaatgaaccctttagcgctgctaatcccttatattcccgaaggttgctctcttgacagccgacgttacgtcccgcataactgatacgcttttcaaataataaaataccctgtgaacttcaagttgctacccagtgacccgctcattcgttcgtgagcggtcagtcatgctgcggcttgaaacacgacgagtataaggagataggggtgcaacgagcacaatattacctgctaggggaacgcgctgtagtgcttgaattggcacccccggtgacgctgcaaagtcagcagcgcatctgggcattggcagaaaagttaaatcaccacgctgacgtgcgggaagtggtgccgggaatgaataacctgacgctgttgctgtatacgccgcaggccgatgccgaggcgatgctggaactgctgcgtcaaggatgggaaggcaacgaaagtctggtgccagaatcccgcgatgtcgatatcccggtgatctatggcggtgaatatggcccagacctggatgaggtggcgcgccataccggcatgacgccgcaacaggtggtggaatgccattcatcggccgcgtatgtggtttatttcctgggcttccaacctggttttacctacctgggtgggatgccggagcgtctggctactcctcgccgagcggaaccgcgcctgtctgttgctgccggttctgtggggattggtggcggccagacagggatctatccgctggttacgccaggcggttggcaactgattggccgcacgccgctggcgctgtttaatcctaatgaaatgccgccgacgctgttgcgcccgggcgataacgtgcgctttgtaccgcaaaaggggggcgtatgctgaagatcttgcgagccggtatttacaccaccgtccaggacctggggcgtaacggtttccggcgtttgggcatcagccagggcggcgctctggatatccccgcgctgaaaatagccaacctgctggtgggcaacccggctgaagcggccgggttggagatcacgctggggcaattcagtgccgaatttacccataatgggtggattgcgctgaccggcgcaggctgcgatgctcagttggacggcaaatctttgtggacgggctggcgctatccggtaaaaaaaggccagcaactgacgctgaagatgcctaaacgcgggatgcgtagctatctggcggtgtctggtggtatcaatgtgccggagatgctgggctcacgcagcaccgatctgaaagcgggctttggtggattggaaggtcgtcagttgaaggaaggcgacctgctgccagcgggtaagccgcaggcgctgccgactacggtcatcggtgtgaaacagccgctgttcagcaaccggataagggtgttgaccgggccggaatatgacgagttcagccaacaggcgcacgacgatttctggcgcactgcttggcagctcagtccgcagagtaaccgcatggggtatcgcctgcacggtggtagtgccctgacgcgcaccactgaacgggaaatgctctcccatggcctgatacctggagtcatccaggttccacacaacggtcagccgatcgtcttgatggccgatgctcagactaccgggggatacccgcgtattgcctgcgtgatcgaggccgatctgttccacttggcgcagatccgcctgggggatgcgcttcactttatcccctgcaccctggcagaggcgcagcgcgccaaggctgaacaggatcactttattcaacagattgcctggggggttaaatgatcgtcgatttgaatgccgatctcggtgaaggttgcgccaatgacgaagcgttgttgcagttggtcagctcggccaatattgcctgcggcttccatgccggggatgcccagaccatgcgccaatcggtgcgctgggcgttgcaatacggtgtggcgattggtgcccatcccagtttcccggatcgggaaaacttcggccgcacccggatgcagttaccggtagaaacggtgtatgcccaagtggtgtatcagttgggtgcgctggccgccattacccgtgctgaaggcggcgtgatggcccatgtgaaaccgcacggcatgctctacaaccaggcggcggtggagcctgaactggccgaagccatcgctcgtgcagtgtatgcggtagatccttcgttacgcttggtggggttggctggcagtgagctgatccgcgctggtgaaaaactggggttggcgacgcggcaggaagtgtttgccgatcgtggctatcaggccgatggaacattggtacctcgtgggcaacctggggcactgatcgccagtgatgaactggcattgcaacagacgctggaaatggttcgccaccagcgtgtacgaaccattgaggggggctgggcctccgtcaaggctgaaaccgtttgcctgcacggcgacggggaacatgcgctggcctatgccaggaagctgagagagagctttgctcagcagcagattggcgtcagcgccacataaaaaaataatgactacagcaaacacaacattgcccgtaagaccgagggcgacaagagggacgttaatatggaacaagcggtaaacctctggccactgataggcatcgctgccatcgtggttggatttgtattgcgttttaacccggtgctggtggtgatcgccgccggtattatcaccgggctggcagctttgatgccgttggatgtcattttggaaaagctcggcgagggctttctcaatccccgtaacctgccgctgatcctgctgttgccgctgccgattatcgggctgttagagcgccacggcttgaaagagcgtgcgcaggcgtggattgccaaaatcaaaagcgccaccgcagggcgtttactgatcgtttacctgtttgtgcgtgaagtgacggcggcaatggggctgaccagcctaggcggccaacctcagatggtacgtccgctgttggcaccgatggcggagggggccacggaaaaccgctatggggaactgccggaacgtgtgcgctatcgtctgcgggcaatgtctgccgcgaccgataacgtcgggctgttctttggcgaagacatttttgtcgcctttggcgcgatcatctttatgcataactttatgctggaatccggcggcattcagaccgaaccgctgcacattgcgctgtgggggatcccaacggcgatctttgccttcctgatccactcgttccgtttgtaccgcatggacaagcaactcaacgctgaactgagcaaacttaaccaggctgcgttgcaggccaagggagaaggccaatgatattccaacaacaatatctctattggctggcgggcgcggtattactgatcgtcgccgcgatgtcgtttggcgataaggccaacccacgtcgtatctctaccggtctgttctgggccttgtatggattgatcttcctggtgggggattggacctatgggctatttggctcaggggccgaagccaaacgtcaactgcatatcaccgtgggggttctggtggtggtgatggctctgatcgccggttttggcggtgtgcgtcttggcagctatcatcagcgcagcccgcaagagcgcgaaaccagtgccaaacgcttgggcaaccgtctgtttatcccggcgctggcgatcccggtcgtcacggtgatcggtgtgctgctgttcaataatatcccggccttgcaacaggcggtgtttggcagcggtaaccactccaccttgatcacgctgttctccatgaccctcggctgtttgcttggcctggttattgcggtgaagatgacccgtgagaaaatgtcgcagccagtgcaggaagctcgtcgtctgttggattccatcggctgggccttcatcctgccgcagatcctggctactcttggcctgctgttcaccgttgcgggcgttggtacggccatctcccacttaacgcaggaatacctggcggtagataaccgctttatcgccgtagcggtgtatgccatcggcatggccgtgttgaccatgatcatggggaacgcgtttgcggccttcccgattgtcactgcgggtatcggtattccgatcctggtactgcaacatggtggtaaccccgcggtgatggcggctatcggcatgttctccggctattgcggcacgttgatgacgccaatggctgctaactttaatattgtaccggcggcgttactggagttgccggacaagaatgcggtcatcaaggcgcagataccgaccggggtcacgttgctattggttaacgtattcctgctttatttcctgatgttcctctaggagaacgcatgcagaaagtattgattaccggctttgagccgtttgacggcgagcgtgtcaacccatcctgggaggtagtgaagcagcttaacgatctggagcttggcggggcgcatattattgcgcgtcagctaccttgcgtcttcggtgaggcgttgacggtgttgaacgcggccattgacgaagttcagccagcgatggtgttggcgatcggtcaggcgggcgggcgtaccgacatcacgctggagcgggtcgcgattaacgtcgatgacgcgcgcattcccgataatcagggacagcagccgatcgaccaggccattgtagctgacggcccggcggcctatttcagcaccttgccgatcaaggcggtggtgaatgcgatgcgtgaggctggcattccggcctcggtatcacaaaccgccgggacctatgtctgtaaccatgtgatgtacggtctgttgcaccgtttaagcgggcagcaggcggtgaagggcggttttatccatatcccttacctgcctgagcaggctgcacagcatcctggtgcgccgagtatggcagcacagacggtgctgtttgctttggaaatggcgatttcgattgccttgcaggtagaacatgacttgaaagtggtgggtggcgccacgcattgaggtgatttatgctacctccatgttaacctcagggttcggcttgccggacccttttcaatcaaggagttgtccatgccagaagggccggagatccgccgggcggcagataagctggcggcggtgatgatcgatcagccactgaccgaagtctggtttgctttcccacaattgaaacactatcagggcgagctggtcggtgaacgtatcactgccattgaaccgcgtggtaaagccttgttaaccgatttttccaacggtttgaccatgtacagccacaaccagctttacggcgtgtggaaggtggtgcgagcgggcgaaacgccagaaaccaagcgcgatctgcgcgtacgactggagactgccgagtgggcgatcttgttgtacagcgcttcggatatcaccattgcgccgcgcggtgagatcgagcaacacccgttcttaaagcgtattggccctgacgtgctggatatggctttgaccgtgcagcaggtggaacagcggctgttatcgccggcgttttgtaagcgccagttaggcgggatgctgctggatcagtcttttctggctggcctgggcaactacctgcgagccgagattttgtggcaggcagaactggcacccaagcataaaccgcaggatctcacccctgatgcgttgcatcagttggcgcaggcgttgttggatattccacgtatttcataccagacccgtggtcaggtagatgaaaatcgccatcatggcacgctgttcagcttcaaggtgtttcatcgcagtggtgagccttgcccgcgctgtggggcaatgatcgagaaaacggcgctatcttcgcgaccgttctattggtgcccggtttgccagaagtaacccataaaaaaacgctgccagtggggcagcgttaagtcgatagggtcattagccgagttggggcgaatatgacgcccctgctaaagcttacttcttaacctgagacttgaactcacgctcggcatagccggtatacagctgacgtgggcgggcgatcttgatgccttcgtcgtgcatttcgttccagtgggcaatccagccaatggtacgggcaattgcgaagatcaccgtaaacatggaagaaggaatacccatcgctttcaggatgatgcctgaatagaaatcgacgttcgggtacagtttcttctcgatgaagtacgggtcgttcaacgcgatgtgttccagctccatcgcgacctgcagcaggttgtcgtctttcttgttcagttctttcagcacttcgtgacaggtttcacgcatcacggtggcgcgtggatcgtagtttttgtacacgcggtggccaaagcccatcagacggaacgagtcattcttgtctttggcgcgcttgatgaactcagggatgtgctcaacggttttgatctcttcgagcatcttcagtgccgcttcgttggcaccgccgtgcgcaggcccccacagggaagcgataccggccgcgatacaggcaaacgggttggcacctgaggaaccggcggtacgcacggtggaggtggacgcgttctgctcatggtcggcatgcaggatcagaatacgatccatggcgcgttccagcactgggttcaccacgtactcttcgcaaggtgtagcaaacatcatgcgcaggaagttaccggcgtaggacaggtcgttgcgtggataaacaaacggctggccaagggaatatttgtaacacatcgctgccacggtaggcattttggacagcaggcggaacgcggtgatctcacggtgacgttcattgttgacgtccagcgcatcgtgatagaacgcggccagggcacctgttaccccgcacagcaccgccattgggtgcgagtcacggcggaaaccacggaacagatgggtgatctggtcgtggatcatggtgtgacgggttaccgtggttttgaaggtttcgaactcttcagcgctcggggtttcgccgtacagcaggatgtagcacacctccagataggaggactcttttgccaactgctcaatcgggaagccgcggtgcagcaggatacctttgtcgccgtcgatgaacgtgattttggattcacaggaagcggtagaagtaaagccgggatcaaatgtgaaataacctttggagcccagggcgcgtacgtcaatcacatcaggacccagtgaaggggtgagtacgcccagttcgatcggagcttcgccgttgttgatgcttagcgtcgctttcttatcagtcatttacagtctccttaacgccttattttaaaaacctctaacaactgaaataccttaaatctccgcaggttgcccgcattaaagtcgagcgaacgctaactctgtgagcgacagcgcatttgcgccggtaggggacagagtttgcaccaggcgaacaagacgggttagcagccgttaacgattcatcgggattcgttattttcttttaatcattacctacgatctgtttggaatgttaaccacatacactatcgctacactcttgcataacttgtgcttagggggaagtgtatccggtgaccgctagtgcatcatagggttgattgctaccctatttgtaatggaaatgttgatctcttgtcaaatcagataattaatttcgtgctaaatgtaataatcgtgatctaaatcactgttctggggaaatgtgaccaaagggattgtatgggaattgtaataagaatgtgaacctcctatactgccgccaggtctccggattaccctgaagtaggagcacccagcgttatcactacgcgccgtttaagcactaggatgtcgatgtttgagcgcgtgaggtgtaagagtgaaaactcttggacgctgtctgatccccacccaggtccggaggaaggaaaataataagagctgtgtgggcaaaaccgtgaaaaaacaaagacctgtcaatctggatctgcaaacgatccggtttcctgtaactgcgatagcgtccatcttacaccgagtctctggcgtaattactttcgttgccgtgggcattctcctctggctgctgggtatctctctctcttctcaagagggcttcctgcacgctgccgccatcatgaatagcttcttcgtgaaattcatcttctgggggatcctcaccgcgttggcctatcacatttgcggtggcattcgtcacttgttaatggattttggctatatcgaagagagtttagccgcaggtacccgttctgcccaggtggcgttcggtctgaccgtcgtgctgtcaattctggctggagtcctcgtatggtaagcaacgtttctgcattaggacgtaacggcgtacacgactggttgttactgcgtgcttccgctatcgtcatcaccctgtatgttctctatatcctgggcttcgtggttacggctccggacatcacctatgaaatctggcgcggcttcttcgccacctccattacgaaagtattcaccttgctgacattgctgtcgatcctggttcacgcctgggtgggaatgtggcaggtgctgacggactatatcaagccactggcgttacgcctggtgctgcaactggcgattgttgtcacgttgctggtctatttactgtacggaacaatcgtagtgtggggtgcataaatgaaactgccaatcagagagtttgatgcagttgttatcggtgctggtggcgcaggtatgcgcgcggcgctgcagatttcccaggcgggctcaacctgtgccctgctttccaaagtattcccgacccgttcccataccgtgtctgcacaaggcggcattaccgttgccttgggcaataaccacgaagacaactgggaatggcatatgtacgacacggtgaagggttccgactacatcggtgaccaggacgccattgaatatatgtgtaaaaccggcccggaagcgattctggaactggaacacatgggcctgccgttctcccgtctggacgatggccgcatttatcaacgcccgtttggcggccagtcactgaactttggtggcgagcaggcggcccgtaccgctgcggcggcagaccgtaccggtcacgcgttgttgcacaccctttatcaacagaacctgaaaaaccacaccaccatcttctccgagtggtatgcgctggatctggtgaaaaaccaggatggtgcggtagttggtaccaccgctatctgtatcgaaaccggtgaagtcgtgtacttcaaggccaaggcaaccattctggctaccggtggggcaggccgtatttatcaatccaccaccaacgcccacatcaataccggtgacggtgtcggtatggcgctgcgtgccggtgtaccggtgcaggatatggaaatgtggcagttccacccaaccggtattgccggggctggcgtactggtcaccgaaggttgtcgtggtgagggtggttacctgctgaataaacatggcgaacgtttcatggaacgttatgcgccaaatgccaaagatctggcgggccgtgacgttgtggcacgttcgatcatgattgagatccgtgaaggccgcggctgtgatggtccatggggcccacatgccaagctgaaactggatcacctgggcaaggaagtgctggagtcccgcctgccgggtattctggagctgtcccgtaccttcgcccacgtcgatccggtgaaagagccgatcccggtcattcctacctgccactatatgatgggcggtattccgaccaaagtgaccggccaggcgctgaccgtgaacgagaaaggcgaagacgtggtgatcccaggtctgttcgcggtaggcgaaattgcctgcgtatcggtacacggcgccaaccgtctgggcggcaactcgctgctggatctggtggtgtttggtcgctctgccggtatgcacctgcaagagtcgttggcagagcagggcgaaagccgcgaagccagcgaatcggacgtcgaagcttcgctggatcgtctgaaccgttggaacaacacccgttctggtgaagatccggtggaaattcgtaaggcactgcaatcctgtatgcagcataacttctcggtgttccgcgaaggtgatgcgatggcgaaaggattggaagagctgaaagtgatccgtgaacgtctgaagaacgcacgcctggatgatacctccagcgaattcaacacccagcgcatcgaatgcctggagttggataacttgatggagaccgcgtattccaccgccgtgtcggccaacttccgtaccgagagccgtggcgcgcatagccgcttcgactatccggagcgtgacgatgccaactggctgtgccattcgctgtatctgccgcaatcggaaagcatgacgcgtcgtgaagtgaacatgcaaccgaagctgcgcgcggcattcccgccgaaagtgcgttcttactaattgcggagctcgattgatgaaacttgaattctctatctatcgctacaatccggatgtcgatagcgccccgcatatgcaggactacagcctggaagcggaagaaggccgtgacatgatgctgctggatgcgttgatccagctgaaagaaaaggacccgaccttatctttccgccgctcttgccgtgaaggcgtgtgcggttcagacggcatcaatatgaacggtaaaaacggtctggcctgtatcaccccggtctcgtcgttgcgtaaaggcaacaacaagattgtgatccgcccgctaccggggttaccggtggtgcgcgatctggtggtggatatggggcagttctatacccagtatgaaaagatcaagccgttcttgattaatgatggcaagaatcctccggcgcgtgagcacctgcaaacgccggatcagcgggaaaaactggatggattgtacgaatgtattctctgtgcctgttgctccacctcttgcccatcgttctggtggaaccctgacaagtttgttggcccggccggtctgttggcggcgtaccgcttcctgatcgacagccgtgatacggaaactgaagcacgattggacgatctgaacgacgctttcagtgttttccgctgccatagcattatgaattgtgtcagtgtatgtcctaagggcttgaatccgacccgtgcaattggtcatatcaagtctatgctgctgcaacgcggcgcataaacagaacgagatgctgcgccggtgtctttaccggcgcacatcccaagaggggatctctaaaaactgacccgtgattgtggttaaaggcaatcaggtttgtcccgccggtttttagaggttccttgtatggggccgcaaggtccaaaacagaacgtgcacttgtataagcacgtctagtgaaccgttaagcgtaccattacggtaattatgttaaccacggcgaaaactgaagctttcaagcttaagggatcaaaatgcagaacggcgcaatgaaggcctggctggattcctcctatctggcgggcgcgaaccagtcctacatagagcagctctatgaagactttttaaccgatccgagttccgttgaagatagttggcgttcgattttccagcaactaccaactgcgggtgtcaaacccgatcagctccactcccaaacgcgagattacttccgccgcctggcgaaagattctgctcgttataacaccaccatcaacgatcctgaaaccgatgccaagcaggtcaaggtattgcagctgatcaacgccttccgcttccgtgggcatcagcatgctaacctcgacccgttagatctgtggaaacaggagcgcgttcccgatctcgatccggcgtaccacaacctgaccgaagccgacttccaggaaaccttcaacgtgggttcttttgccatcggcaaagaaaccatgaagctgagcgatctgtacgcggcgctgaagcagacctactgcggttcgatcggtgccgagtatatgcacatcaccaacaccgaagagaaacgctggatccagcagcgcattgaatcggtagcggggcgtgccagcttcaccaccgatgagaaacgccgtttcctgagcgaactgacagcagccgaagggctggagcgttacctgggtgccaaattccctggggctaaacgcttctcgctggaaggtggcgacgcgttggtgccgatgctgaaagaaatggtgcgtcacgcgggcaaaaacggcacgcgtgaagtggtgctgggtatggcccaccgtggccgtctgaacgtgttgatcaacgtgctgggtaaaaaaccggccgacctgttcgacgagtttgccggcaagcataaagaacacctgggcaccggtgacgtgaaatatcaccagggcttctcttccgacgtggaaaccgaaggcggcatggttcacctggcgctggcgtttaacccgtcgcacctggaaatcgtcagcccggttgtcatggggtctgtacgtgcccgccgtgaccgtctggacgaagcgcgcagcaacatggttctgccaatcaccattcatggtgacgcagcaatcaccgggcagggcgtggttcaggaaaccctgaacatgtcgcaggctcgcggttatgaggtgggcggcacggtgcgtatcgtcatcaacaaccaggttggtttcactacctccaacccgttggacgcgcgttccacccaatactgtaccgatatcgccaagatggtgcaggctcctatcttccacgtgaatgccgatgatccggaagcggtggcctttgtcacccgcctggcgttggatttccgtaacacctttaaacgtgacgtgatgatcgacctggtctgctaccgtcgccatgggcataacgaggccgatgagccaagtgcaacccagccggtgatgtatcagaagatcaagaaacacccaacgccacgcaaactctacgctgacgtgctgaccgaacagaaggttgccagcctggaagatgccacggaaatggtcaacctgtatcgcgatgctctcgatcgcggtgactgcgtggttgaagagtggcgtccgatgaacctgcactccttcacctggtcgccatacctgaaccatgaatgggacgaagagtacccaagcaaggttgagatgaagcgcctgcaggaactggctcgccgcatcagcagcgtaccggaagcgatcgaaatgcagtcgcgcgtcgcgaaaatctacggcgatcgtgccgagatggccgcaggcaacaaaccgttcgactggggcgcagcggaaacgctggcttacgccaccatggctgatgaaggcatcccgatccgtatttccggcgaagatgctggccgtggcaccttcttccaccgtcatgcggtggtgcacaaccagaaaaatggttctgtctatgtcccgctggctaatatccacagcggccagggcgaattcaaagtctgggactcagtgctgtctgaagaagccgttctggcatttgaatatggctacgccaccgcagaaccgcgcaccctgaccatctgggaagcgcagtttggtgactttgccaacggtgctcaggtagtgatcgaccagttcatcagttccggtgagcagaagtggggccgtatgtgtggcctggtgatgctgctgccgcacggttacgaaggccagggcccagagcactcctctgcgcgtctggaacgttacctgcagctgtgtgcggaacagaacatgcaggtgtgcatcccatccactccggcacaggtctaccacatgctgcgccgtcaggcgttgcgcggtatgcgccgtccgctggtggtgatgtcaccgaagtccttgctgcgtcatccgctggcagtctcttctctggaagaactggcaaacggcaccttccaaccagccatcggcgaaattgacgagctggatgccaaagcggtgaaacgcgtggtgctgtgttctggtaaggtttattacgatctgctggagcaacgccgcaagaacgaccagaaagacgtggccatcgtacgtatcgagcagctgtatccgttcccgcatcaggccgttcaggcggtattggaacagtatgcccacgtgcatgatttcgtctggtgtcaggaagagccgttgaaccagggcgcctggtattgcagccaacacaatttccgtgaagtgatcccgtttggggcctctttacgttacgcaggacgtccagcctctgcctctccggcggtaggttatatgtccgtacaccagaagcagcagcaggctctggtgaatgacgcgctgaatattgaagaaaaaatttaaaggaaagctaatgagtagcgtagatattctggttcctgacctccctgaatccgttgccgatgcgaccgtcgccacctggcataaaaaaccgggtgacaccgttcagcgtgacgaagtgctggttgagattgaaaccgacaaagttgtattggaagtgccagccagtgaagccggtgtactggaagcaatcctggaagacgaaggcgcaaccgtgacttcacgtcagcttctcgggcgtatccgtcagggtgacagctctggcaagccgaccgaagcgaaagctcagagcgttgaatcaactccggctcagcgtgcaaccgccagcctggaagaagagaacaacgacgcactcagcccggcgatccgccgcctgattgccgaacacgatctcgatgctgccgccatcaaaggcagcggcgtgggtggccgtatcacgcgtgaagacgtagaagcgcacctggctgccagcaagaaagcggcaccggctgcagcagccccagcggcggcacctcagccagccttgggcggccgtagcgaaaaacgtgttcctatgacccgtttgcgcaaacgcgttgccgagcgcctgttggaagcgaagaacagcaccgcgatgctgaccaccttcaacgaaatcaacatgcagccgatcatggatctgcgcaagcagtacggtgaagccttcgaaaaacgccacggtgtacgtctgggctttatgtccttctacatcaaagcggtagtcgaagcgctgaaacgcttccctgaagtgaacgcctctatcgacggtagcgacgtggtttaccacaactacttcgatatcagcattgcggtatcgactccacgtggcctggtaaccccggtactgcgtgacgtcgactccatgagcatggcggacatcgagaagaaaatcaaagagctggcgatcaaaggccgtgacggcaaattgaccgtggaagagctgaccggcggtaacttcaccattaccaacggcggcgtcttcggttcattgatgtctaccccgatcatcaacccaccacagagcgccatcctgggtatgcacgccatcaaggatcgcccaatggcggtcaatggtcaggtcgtgatccagccgatgatgtatctggctctgtcttacgatcatcgtctgatcgatggcaaagagtcggtgagttatctggtgacggtgaaagacatgctggaagatccggctcgtctgctgctggacgtttaaatccctgcaagggcgcggccttgccgcgcccacaccctgtgctatgtggccgataagtcatgcggaataccgcgaaagtgacccggctaaaactttctgacctgaatggatagaacatcatgaatttacacgaatatcaggcaaaacagctgtttgctcggtatggcatgccagcaccaaccggttacgcctgtaccactccgcgtgaagcagaagaagccgcatctaaaatcggctccggcccgtgggtggtaaaatgtcaggttcatgctggcggccgtggtaaagctggtggcgttaaagtggttaacagcaaagaagatatccgtgcttttgccgaagcctggctgggtaaacgcctggtgacctaccagaccgatgcgctgggccagccggttcaccagatcctggtagaagcggccactgacatcgataaagagctgtatctgggagcggtagttgaccgtgccagccgtcgcgtagtgtttatggcttccactgaaggcggcgttgaaattgagaaagttgcggaagagaccccggaactgatccacaaaatgaccatcgacccactggcaggcccacagccttaccaggggcgtgagctggcattcaaactgggcctgaccggtaagcaagtcggccagtttgccaaaatctttatgggtctggcaacgctgttcctggagcgcgatctggcgatggttgagatcaacccgctggtcgtgaccaagcagggcgatctgatctgcctggatggtaagctgggtgccgatggcaacgccctgttccgccagtccgaactgcgtgaaatgcgtgacccttctcaggaagacgagcgtgaatcccgtgcggctcagtgggaactgaactatgttgccctcgacggtaacatcggttgcatggtgaacggtgccggtctggcgatgggtaccatggacatcgtgaaactgcacggtggcgaaccagccaacttcctggatgtgggcggtggcgcaaccaaagagcgcgtgaccgaagccttcaaaatcatcctgtctgatgacaaggtgaaagcggtactggttaacatcttcggtggcatcgtacgctgcgatctgatcgccgacggtatcattggcgcggtagccgaagtgggcgttaacgtcccggtcgtcgtgcgcttggaagggaataacgccgaactgggcgccaagaaactggcggacagcggtttgaatatcattgctgcgaccagcctgactgatgcggctcagcaagttgttgcggcagtggagggtaaataatgtccattttaatcgataagaacaccaaagtaatctgccagggtttcaccggtagccagggtaccttccactccgaacaagctatcgcttacggcaccaaaatggttggtggcgtgactccaggcaaaggcggtactcagcacctgggtctgccagtgttcaacaccgtgcgtgaagctgttgaagcgaccggcgctaccgcgtctgttatctacgtgccagcgccattctgcaaagactccattctggaagctatcgatgcgggcatcaaactgatcatcaccatcaccgaaggtatcccaactctggatatgttgaccgtgaaagtgaagctggatgaagccggtgtgcgcatgatcggcccgaactgcccaggtgtaatcaccccgggcgaatgcaagatcggtatcatgcctggccatatccacctgccaggcaaggtaggcatcgtttcccgttcaggtactctgacctatgaagcggtaaaacaaaccactgacgccggtctggggcagtctacctgcgtcggtatcggtggtgacccgatcccgggttccaactttatcgatatcctgaagttgttccaggaagatccgcagaccgaagctatcgtcatgatcggtgagattggcggcagcgcggaagaagaagcggcggcctatatcaaagagcacgtcaccaagccggtggtgggctatatcgccggtgttactgcacctaaaggcaagcgtatgggccatgctggcgccatcattgccggcggcaaagggactgcggatgagaagttcgcggctctggaagcggcaggggtgaaaaccgtacgcagcctggctgatatcggtgacgcagtgaaggcgatcctgaatcgttagtaccctatagcaaataataatatctcgacatgtttggccgccctttgggcggccttttttttgtatgtcactgagagggaaggggggtttttgcaaggtattgttgcgggaggtgcgaactgaccactcagtatttgcaggttctgagatcaacctcgcaacatggtctatgattacttagcaaaaagcagatttgtgagttaactcactgtaatcggcattgaaaataaaaagttaatatctatcgaatggtaatgctgaagtaatacaattgggggtattttaaattacatttatttaacacaaagatatcaataaaaaacaattaaaccattgcttaacatgggcgctgggaaattacagtaaaatgtgtaatgagcctagcaataatatgcagataggcttaaattgttttagatcaatataggcctagctacctatttaggctgatttttgacctgtagccaaaagtccaacctgtgtcacgcaaatacctatttattgtatgggctttggcgagtatcatgccattgtgtaattacggatggttgatcttgttgcatttgttacccgctgtcggttttcattggtgcgttttgctcccgtccctcgtggtctggctctgaacgtgcggttgaaagcggagaggctggatcaaattttgttgtgtttaagggcattcactgcggggcgttaccggctactctttcgggagtaataccgataaccgcaagtcggagtcttcctgcgaggagcaaggagtcaagatgtttgatattgtcgaactgtcgcgcttacagtttgctttaacggcgatgtaccacttcctatttgtcccattaacgttgggtatggcgtttttgctggcaattatggaaacggtatatgtgctgtccggcaaacaaatttataaagatatgaccaaattctggggcaagttattcgcaattaactttgctctgggtgtggccaccgggttgaccatggagttccagttcgggaccaactggtcgtacttctctcattacgttggtgacatcttcggggccccgctggctatcgaaggtctgatggcgttcttcctggaatcgacgctggtcggtctgttcttcttcggctgggatcgcctgagcaagatccagcacatgacggtcacctggtttgttgccctcggctcaaacctgtctgcgttgtggatcctggtcgccaacggctggatgcaaaacccaatcgcctccgacttcaactttgaaaccatgcgtatggagatgctcagcttctccgagctggtcttgaacccggtcgctcaggtgaaatttgttcacaccgtggcctctggctacaccaccggcgcgatgttcgtgctgggtatcagctcttactacctgctgaaagggcgtgacgttgcttttgccaagcgttcgttcgccattgctgccagcttcggtatggctgctatcctttccgttatcgtactgggtgatgaatccggttacgaaatgggggacgtgcagaaaaccaaactggctgccattgaagccgaatgggaaactcaaccggctccggccgcatttaccctgttcggtattccgaaccaggagaaaatggagaactccttcgcgattcaaattccttgggcgctcggcctgattgctacccgttctatcgacaccccggttatcggtctgcgcgaactgatggctcagcaccaggtgcgtatccgtaatggtatgaaagcttaccaactgctggaagagctgcgtggtggtaataccgatcctgcagtgcgtaccgcattcaacgataccaaacaggatctgggctacggcatgctgctcaagcgctataccgaaaacgtcaccgacgcaacggaagcgcagatccagcaggcaaccaaagattctatcccgcgcgttgctccactgtacttcgccttccgtatcatggtggcctgtggtgtgctgatgctgtttattatcggcctgtcattcttgagcgtggtacgtggtcgtatcggtcagaagaaatggctgcttcgcgctgcgttgttcggcctgccgttaccatggattgccgttgaagcgggctggttcgtggcggagtatggccgtcagccgtgggcgataggtgaggtgctgccaaccgcagtcgccacctcttcgctgaccgcaggcgacattctgttctcgatggggctgatatgcggcttgtacaccctgttcctggtggctgaaatgtacctgatgttcaagtttgcacgtctgggtccaagcagcctgaaaactggccgctaccactttgaacaaccgactgccgccgtgcaggaagcgcgctaaacaggagtccaagatatgtttgattatgaagtactgcgatttatctggtggctcctggttggcattctgctgatcggtttcgccgtcaccgatggtttcgatatgggtgtcggtattctgatgcgcatcatcggtaaaaccgataccgagcgccgggtaatgatcaacgccattgccccgcactgggacggtaaccaggtgtggctgatcaccgccggtggcgcattgtttgccgcctggccaatggtctatgctgccgcgttctctggtttctatgtggccatgatcctggtgctggctgccttgttcttccgcccggtcggttttgactaccgctcgaagctggagaacagcacctggcgtaacatgtgggactggggcatctttgttggtagcttcgtgcctgcggtggtgttcggcgtggcgttcggtaacctgttacagggcgtaccgttccatattgacgaatatctgcgtctgttctataccggcaacttcttccaactgctgaacccgtttggtttgctggccggtattgtcagcctgaccatgctggtgactcagggggcaacctacctgcagatgcgtaccactgccgagattcacctgcgctcacgcgctgcggcgcagatttctgcgctggtgatgggcgtatgcttcctgttggcgggtatctggctggtgaaaggtatcgacggtttcgtgatcacctcagcactggatacggcagcggaatccaacccactgcgtaaagaagtcgctcatcaggcaggtgcctggttgatcaacttcaacaagtatccaatcctgtgggcactgccggcgttgggcgtggttctgccactgttcactatcctgtttgcccgtttggacaaagctgcgatggcgttcctgagttcatcactgacgattgcctgcgtgatcctgacggctggggtaaccatgttcccgttcgttatgccatcaagcaccgtgcctaacgtcagcctgaccatgtgggatgcgacttccagcctgttcacgctgcaggtgatgaccgttgttgccattatcttcgtgccaatcgttctggcgtacaccgcttgggcgtactacaaaatgtttggtcgcctggataagaacttcatcgaaaaaaataagcattcgctgtactaagcaaaaggagctaaaccatgtggtattttgcctggatcctcggaacgcttcttgcctgtgccttcggtatcatcacggcgctggcgcttgagcacagtgaagattcaaaagcgcagcaagacggtaagtgatgagttcgtcactggtggataagctgtacgctatcaccgacaagggcccggttcgggccctttcattggtgttggcggtgattttggcgggatgtatcttctgggatccgagccgttttgcagcacgtaccagctcgttagagatctggcagggcatcttgctgatctgggcggtatgtgcgggcatcattcacggtgtcggctttcggcatcagagcacgttttggcgtgcatttttcgcgccattacctgcaattgtgatcctcgccgcaggattactttacgtttctttataatctattacgcatcccccctgttatgggccgttcaggcccataattattttcattcccattcagtaacccattcccaacccgatccgtcttgcgtatagtagcaagcgttcaattgccttggtttggaagtctcgtgagtaataagttgtttcgatggccggttcgtgtttactttgaagacaccgatgccggtggtgtggtctaccatgcccgttacgtcgctttttatgaaagagcgcgcaccgagatgctgcgtcaacataactttcatcaacagcagctgctcagtgaagaacatgtcgctttcgctgtccggcgtatgacggtggattatctgtcaccagctcgtcttgacgacctgctggaagtgcagagcaaaatcacctcaatacgcggggcttctcttacgtttgctcaacgcattgttaattctgacggtactctcttgagtcaggccgatgtattgattgcatgcattgatccacaccaaatgaagccgatagcgcttcctaagtctattgtcgcggagtttaagcagtgactgacatgaacatcctagatctattcttgaaggcgagcctgctggtcaagtttatcatgctgattttgatatgcttttcagtggcctcttgggcgattatcatccagcggacccgcatcctcaatgcggccactcgcgacgccgaagccttcgaagacaaattctggtctggtatcgagctttcccgtctgtatcaggaaagccaggcgcgtcgcgatagcctgactggctcagagcagattttccattccggtttcaaagagtttgcccgtttgcaccgcgctaacagccatgcgccggagtcggtgatcgaaggggcaacgcgtgcgatgcgtatttcgatgaatcgtgagctggaaacgctggaaaaccatattcctttcctcggcaccgtgggttccatcagcccgtacatcggcctgtttggtaccgtgtgggggatcatgcacgcctttatcgccctgggcgcggtaaaacaagccaccttgcagatggtcgctccgggtatcgccgaagcgttgatcgccacggccatcggtctgtttgccgcgatccctgccgttatggcctataaccgcctaaaccagcgcgttaacaagcttgagcagaattacgacaactttatggaagagttcaccgctattctgcatcgtcaggccttctccagcgacagcaaataggaagtaggagggtagcatggcgaaagttcgtggtcgtaacaagcgtgagctgaagtcggaaatcaacattgttccgctgctggacgtcttgttggtgctgttgctgatctttatggcaaccgcgccaatcattacccaaagcgttgaagttgatttgcctgatgccaccgattccaagacggtgtccagcgacgataatcctccggtgatcctggaagtttccggcgtaggccaatacaccctggtggtggatcacaaccgtatggagctgttgccgcctgagcaggtggcggccgaagccaagtcgcgtctggcagctaatccgaagacggtgtttttgatcggtggggccaaggaagtcccgtatgatgagattatcaaggcattgaatattctgcatcaggcgggtgtcgcttccgtagggttgatgacccagccaatctaaccgtaaggtcagtggcaacccggttcctgcactgtggtgcaggaaccccgtttaagcagcagtttttgggattctattttggtaaaggcaactgagcaaaatgataagctgaaccgctccgtgattgtttcggtggttctgcacattctattgattgccctgttgatttggggttcgctgtacgaaaatactgaaatgagtagtgcaggcggcggcggtgatggttccgtggtcggggccgtgatggtcgatccaggggcggtggtagagcagtacaaccgccagcagcaacagagcagcgatgcacagcgtgcagaaaagcagcgccagaagaaggcggagcagcaggctgaagagctgcagcagaaacaggcggcggaacagcagcgcctgaaagaactggaacaagagcgtttggccgcgcaggaaaaagctgcgcaggacgccaaggcccaggccgaacagcagaagaaagccgccgagcagcaacagcaggccgctgagcagcagaaagcggcagaagccgctgcggcgaaggccaaagaacaacagaaggcagccgaacaggctgcggcgaaagccaaagccgaggcggataaaatagccaaggcgcaggcagacgcgcagaagaaagccgaagcggaagccaagaaagaagcggccgctgccgccgctgctaaaaagcaggcggaagaggcgaagaaagaagccgccgcggccgctgaacagaaagcagctgaggctgcagagaagaaagccgctgccgacgctgagaaaaaagctgccgcagaagaagcgaaaaaagccgccgctgccgagaaggctgctgccgccaagaaagccgcagatgccaagaagaaggccgctaaagccgctaaacagtctgctgatgtagacaatctgtttggtgatttggctgatggtaaaaacgcgccgaaaggtggcggtgccaaggctaaaggtgacggcaaaccggcagggcagggtaatgccaaaactgcgggggcaagcggtgccgagattaatggttacctcgggcagattactgctgcaatacagagcaagttttacgatgccgacctttacaaaggaaggacctgcgatttacggattaaattggcaccggatggcttgttgattgatgttaaggctgaaggtggggatcctgccttgtgtcaggccgcattggcggcagctaagcaggctcgtattccaaagccacctagccaggcggtgtatgaggcatttaagaatgctcctcttacatttaagcctcaataatgattgtcttaaaccgagtaaaatgcatggatgtaccaaggtaaccaacagggaatatgtagtgttgttggcgttggtttgttaaaattctgctaaattatcgcaggcataccgtctggataagggagatgagatgaagcaggcatttcgagtagcgttaggtcttattgttctgtgggcatccgtgctgcacgcggaagttcgcattgaaatcacccaaggggtcgactctgctcgcccgattggtgtggtgccttttaaatgggcgggcccaggcacgcctccggaagatgttggccagatcgttggcgcagatctccgtaacagtggcaaattcaacccgattgatgtggcacgtatgccgcagcagccaaccaccgcgtctgaagtgacgccggcggcctggactgcgctgggcatcgacgccgtagtggttggccaggttcaacctggtgccgacggcagctacctggtttcctaccaactggtcgatacttcaggttcgcctggcaccatattggcccaaaaccagtttaaagtgaccaaacagtggctgcgttatgcggctcataccgccagcgatggcgtatttgagaagctgaccggcatcaagggcgcattccgtacccgcatcgcttacgtagtgcagaccaacggcgggaaattcccgtacgaactgcgcgtatcggattacgacggctttaaccaggttccagtacatcgttcaccagagccactgatgtcaccagcctggtcgccggatggcagcaaactggcctacgtgacttttgagagcggtaaatcagcgctggtgatccagaatctgtctgatggtgccatccgtcaggtggcttcattcccacgtcacaatggtgcaccttccttctctccagatggtagccgcttggcattcgctctgtccaaaagtggtagtctgaacctgtacgtgatgaacctcggttctggccaaatcagccagatcaccgatggtcgtagcaacaataccgaaccgagctggttcccagatggtcaatctctggcttatacctctgaccagggcggtcgcccacagatttataaggttggcgccaacggcggcgcaccacagcgtctgacctgggaaggtgcccagaatcaggactctgatgtcagcttcgacggtaaattcctggtgatggtgagttccaataatggggttcagcatatcgccaaacaagatctcggatcgggagccgttcaaatgttaacggacacgttcctggatgaaacgcctagtatcgcaccaaacggcaccatggtgatctatagctccacgcaaggtatgggctccgtgctgcagttggtatcgactgatgggcgcttcaaagcgcgtcttccggcaaccgatggacaggtcaaattccctgcctggtcgccgtatctgtgatgcatgtttaaaatatgtatggcaaaaactataaaaggatcaaagaaatgcaactgaacaaagtgctgaaagggcttctgctggcactgccagttctggctgtagcagcttgtagttctaacaaaagcgctaataacgatcaatccggtatgggcgctggcactggtacagaaaacggcagcagcaacctgtcttctgaagaacaagcacgtctgcagatgcaagaactgcaacgtaacaacattgtttacttcggcctggacaaatatgacgtcagctctgagttcgctcagatgctggatgcgcatgctgctttcctgcgtaacaacccatcttacaaagtgactgttgaaggtcacgcggatgagcgcggcacgccagaatacaacatcgctctgggtgagcgtcgtgctaacgcagttaaaatgtacctgcaaggcaaaggcgtttctgctgaccaaatctctatcgtttcttacggtaaagaaaaaccagcagtactgggccacgacgaagcagcctatgctaaaaaccgtcgtgccgttctggtttactaagagaatcgcatgaacagtaacttcagacgtcacctgttgagtctggcgttactggttggcgtagcggtcccatgggccgctactgcccaagcgccaatcagtaatgtcgggtccggctcggtcgaagaccgtgtcacatcacttgagcgtatcagtaatgctcagggccagcttttgaaccaactccagcaacaactctctgacaaccaacgcgatatcgatacgctccgtgggcagatccaggaaagtcagtatcagttgaatcaggtggttgaacgccagaaacagatctatcaacagatggatagccttagccagggtggcgcacagaattccgctggtgcagcagcaggggccgcaggtggtacagccgccgcggcgtcctctgacggcgctggcagcgctcctgcgggtgcgacagccgctgcggctagtacgggcgatgaaaacagcgattacaacgccgctgtttcactggcgctggaaaaaaagcagtatgaccaggcgatctccgcttttcaggctttcataaagcagtatccgaaatccacttacctgcctaatgccaactattggctgggccagttgtactacaacaagggtaagaaggaagacgcggcatactattatgcagtggtggttaagagttacccaaaatcacccaaggcgccggacgcaatgtataaagttggggtgatcatgcaggaaaaagggcaggctgataaagccaaagccgtttaccagcaggtgatcaaatcgtacccgaccagcgatgcggccaagcaggccaagaaacgcgaagcgagtttgtaagtaaaaactgagcccagaagttagtcgatttgaccgaattctgggctcattcgcgtgaagaacaagcagttgaacctattgcgccaaaatttaggttgcgctgctgagataaattagtaatatatgccgccgttgccaagacaacttgcaagatgttaaagcagcaaggaaattagtagtaaaccacgacagtgggtcgttagctnnnnnnnnnnnnnnnnnnnnnnnnnnnnnnnnnnnnnnnnnnnnnnnnnatagtgaattggtaaagagtggagcagtaaccacgacagtgggtgattagctcagttggt

SEQ ID NO: 308 - DNA, 1813 bp, unknown
  Altogen  635822 strain
  misc_feature (247)..(343): n is a, c, g, or t
  misc_feature (412)..(453): n is a, c, g, or t
  misc_feature (862)..(967): n is a, c, g, or t
aaaagaccaattccaacaggcgggcaacattggcgccgggttagctacgcgctggtttccgcatattgacgccacttttacagagttcggcatcacctcagctgtagaccaggcgatgtttatcgctcagttcggccatgagtctgccggtttcacccgtgtggtggagtcgttcaactacagcgttgcgggccttcaatccacgttcggtaaacgcctatcgaaagaccagtgcgcgatgctgggnnnnnnnnnnnnnnnnnnnnnnnnnnnnnnnnnnnnnnnnnnnnnnnnnnnnnnnnnnnnnnnnnnnnnnnnnnnnnnnnnnnnnnnnnnnnnnnnncgggcgcggaattccgcagattaccgggctggataactaccgcgcctgcagtgccgcattgaaagctgnnnnnnnnnnnnnnnnnnnnnnnnnnnnnnnnnnnnnnnnnnatacgcgatgcgtgccgctgggtggttccggtctgccaacaaatgcggccagttcggtgctgacgtcgaaaaagtcacgaaggtgatcaacggcggcttaaacggcatcgaggaccggaaagcgcggtttgaagtagccagcaaggtgctggcgtgagctggctcaccggatggaagaatgcggcgctgttaggcctgctggttaccgccattattctggcactcaacggcgcgacattatctagccagttggatttggcgcaggaaacggtaaagaaccagggaaaggtactggaacagcagaccgcattgattggcgtaatgcaggcaagtgacgccagcaaccgcgcactgatggcggcccagttgcagaatgaacagcagttgcgccagcaggccaccgccaacnnnnnnnnnnnnnnnnnnnnnnnnnnnnnnnnnnnnnnnnnnnnnnnnnnnnnnnnnnnnnnnnnnnnnnnnnnnnnnnnnnnnnnnnnnnnnnnnnnnnnnnnnnccctgaatctgtcttcaccccctgcgaacggccaacactgcagggcaagacatggggtgacgcactcagctacacgttggcgcttcaagccgcattactaatctgcgcagggcaggtgggaacgctgaacgcctggcgcgctggattgcaaaagtaagttgtatttgtgagccataaccgttgaaaaattattgttaatccctaattatgaatgattgcctgccaaaccggaaaggcgctaaaaatagggaaacatattctaatggatacttattatgttaattttttgtctatggttggggtatgcactgcggctttggcaactgtagctggggtagtagtagcgatatgtgccttgaatacatggcgcaaacaatatgtcgaaacattgaaaggcaacctcattgcctcattggttgattactctacaaccttgccctatttacccaatgttatttctagcgatgacccaaatcggatggttcatattgggcgtattgctggggcattttatgtatatcagagagcatgggcggttttgaaaaccacgctaatgaagaacgagaaagatcacgataagttgttatcaagctggaaggatgatatgtctaaattcttggatcttcataatggctacatgaatggcacaatccagagtggtgatctaagaaaatatgtggatgaaatttgctataaaaaaaggaagtaggaagtaaccaaaaatgcacaggctgatacgcttcgagaacttcactgtgcaatgaacctctgaaatcgacagacaccacgaccttttagaaagcccctgcttaaccgccggggtttttttgttttacggagatcgct

SEQ ID NO: 309 - DNA, 81533 bp, unknown
  Altogen  635822 strain
cagggctatcagctccctctccccacaggaagagtggaccgatcgagtttgctgagatgagctctttacttgcaaaagggcagggctatcagctccctctccccacaggaagagtggaccgatcgagtttgctgagatgagctctttacttgcaaaagagcaagggctataagctccctctccctgtgggagagggttggggtgaggggattactgtgggaaccacttatcgttgatcgccttgtaggtcccatccgccttgatcgcgtccagtgcagcattcagcttggccagtagtgcctggttatccgggcgcacggcaatgcccagaccggtaccaaagtactgcgcatcggttacgtgctcgcctacggcggccagttccgggttgttcttcagccactcattaaccaccgccgtgtcaccgaacacgccatcaatacggccattcttcagctctagcacggcattttggtagctgtcataagacacggtgttaatttccgggtgcttgtcctgcatgtatttttgatgcgtggtgccgttttccatccccagctttttgcctttcaaatccgccagcgtagtgaacttgcctttctgagcaatgacaatggccgagttggcataatagggctgggtaaaggtaacctgcttgctacgctctggcgtaatgtccatgccggaaatcaccgcatcatattttttgaatttcagcgcggcgatcaggctgtcaaaggcctggttggtaaaggtgcagtcggcctgcatctgcttgcacaaggccttggccaaatcgatatcgaaaccgacgatctggttattggcatccagagattcaaacggcgggtaggtcgctgaagaggcgaaacggatggtgtcggcggcggcggcgttaaaggtgatcccggcgagaatggtggcggcaagtaacagctttttcatcggtacggctcctgtcgtaaatttgattgttgtctcgccaccttttttttctaacaatggcacaagggcattgtgagtggctatgccgataacaatgccatttagtgaattactatgcaatataaatgactagaaaattatttttggccataaaaaagccctgcacatggcagggctagttcagcgaggtttggctcagttacgccgttcaaacgccaatgcacggcgttcaaccatacgcatcagtaacgtcagcaggccattgacgcacaggtacacaatgccagcggcaccgaagaccatcacgtcataagtccggccatacatcagttggctgtagcccatcacttccatcagggtaatggtataggcaagcgaggtactcttgaacaccagaaccacttcgttggagtaggatgacaaggcacgtttgaaggcatatggcagcagaatacgtagcgtttgcttgcgtgacatgcccagtgcttcacaggattgccactggcctgccgggatagcgcgtaccgccccatggaacagcagggtggtgtaggccgcactgttcagtgccaacgcaatcatcgcgcagagccagggttgcgaaagcaggttccacaaccagggatactcacggatcgccgggaactggccagggccgtagtaaatcaggaagatctgcaccagcaacggtgtaccagtgaacaacgtaatgtacgccttcaccaactgcgttagcaccggggtttttaacgtcaggatcaccgtcagcactagcgacatcagcaaggcaacaatcagtgcgacgatcgtcaacgacaggctggtatgcaagcctttgatgatttcggggatgaactcaagcatcaggctggcccccgctcaaaacgtgtggtgcgcagctcgatccgcttaaggatatactggctcagcagggtgatcaccagatagattgccgcggcaatcacataccaggtaaacggctcctgggtgcgggtggcaatgcttttggtctgcaacatcagatcgttaacgctaatcaacgacaccagcgcggtatctttcagcagcaccagccactggttgcccagccccggcagcgcgtgacgccacatttgcggcatgatcaaacggaagaagatggctgtcttgcttagccccagagcctggccggactcccattggccctgtggcaccgctttcagcgccccacgcagcgtttgcgacgcgtaggcagaatagagcagggccagggcgataacgccgcacaggaacgggctgacttcgaaattatcgatggacagttgcaccggtagttggaacaggccgaagttcaggacgaagccgtcggacagcatcatcagcaactgtgaagagccgaagtagataaacagcaccaccagaatttctggcaagccgcgtagcagggtcacccaggcggtgccgagccaactgaccgctttccagcgggatgattcccagacggcaaacagcatcgccaggatcaggccgaggaccagggcacaaacggcaaggccgacggtcatcccggcggcgctagctaaaggttggatttcattcatggataatgattactgctggaaccattttttgtagatggtttcgtaagtcccatcctgcttgattttatccagggcggcgttgaatttgccctgcagttcggtattttgcaggcgcatggcaatgcccagaccgctaccgaagtagtctttatccgtcactttatcgcccacagcggccagcgctgcgttttctttcagccactcgttaaccactgcggtatcgccgaacaccgcatcaacacggccatttttcagatccagaatggcattctgatagctgtcgtaacccacggtggtgatttccgggtgtttatcggtcaggaatttttggtgcgtggtgccgttctgcacgccaacgcgtttgcctttcagcgcggccacgtcggccactttacctttctcggcaataaacagggccgagttatcgtagtaaggcttgctgaacagcacctgcttttcgcgctcaggggtgatatccataccggccatcacggcgtcgaaacgcttgaacttgaggcttgggatcaggctgtcgaagccctggttggtaaaggtacactcagcctgcatctctttacacagagcgttggccagatcgacgtcgaagccctggatcttgttatccgccgcgacaaattcgaacggagggtaggaagcttcggtagcgaaacggatagtttcggctgctgaggcagaaacgctgatgccagccagaacggcggcgattagtagttttttcatcgcaaactccctgagaacagcaaatatcgctattagtgtgataagtaattggcaaactctacggtttgcggttgtgcaaagtggctggcatcgccctgttcgacgatatggccattttccatatacaccacgcggctggcggttttacgcgcgacttcaacctcatgggtgacgatcacctgagtaataccggtgcccgccaactcgcgaataatgctgacgatctgcgcggtaatttccggatccagcgcggccgtaggctcatcgaacagcagaacctgaggttccatcatcagcgcacgggcaatggctacgcgctgttgttggccaccggagagatgcagcgggaaacgttcggcaaaatcggtcaggcgtaaccgggtcagcaacttgtcggcacgcgccatcgcttgtgccttgctcaggccaagtacgcggcagggcgcttcgatcaggttctgcaccacggtcagatgtggccagagattgtactgctggaacaccatgcccacgttttggcgcagttcgcggatggatttctcccccggtgactgtttaaagtcgaactgattgcccgcgatttgcaggtggccagagcgtggcatttccagcaggttaagcacccgcagcagcgaactcttacctgcaccgcttggaccaagcagcaccagagtctcaccggcagggcaatccagtgtaatgttaaacagcgcctgatgtgcgccgtaaaagcagttgatatcttttagttgaatactcatgcgctgaaattgaatagacattgatgccgggaatggtaacttccacagaatacttatgcaatctttgtgagttaaaatttattagtgcgtcgcagaatgactaaataatagcagaagataccgtgagcgctggctgaatggcggatttgtcgcgaacactgtgagatagctagctatttttctcaaggtgatggaattttgagcatttctgatgggggataattggcaaccgggaaggtgatacacccggttgccattttggtgttactggttctcaaggacctgacgcagcgtaccgctggcggcatgcggcgggatgttgaggaagcggatgtcgtcaaccacccagcaggtaccttcacggaccatcagcacttcgtcctgccagttgattgcactggcaccttctttttggtgagtgagctgtacacgcagcgggatgtttttggcatcggtgttaggaatggtggaagcgctggcaaccgttgcgctggttggcccctgggcattgccagagaacagatcgccggtgatggtgtgtttgccagggtgctggctggcactgaccagatcctgatacagcacctggctcaggtaaggttgcaactgtgccaggcggctgctgtccggcagtgcggtgcttgggccttgctgaatgcgcaggtcatagaatttctgggccaccgtatccgggccaccttccacgcaggcgccagtgcgaacgccaacatccttaaaggccggctcgacggtagtacaggcgcttaagaacagggccaagggtaaaacaacagcaagcgtttttgttttcatctcataaccttatgtaaaagtctctcaaccatgaagaccgaaaaccacgggactagcctacagtataaaggcgtttttggtccttgcattggtgctgtgtgccattgtgccacagaacatccgcttaaattagctgtcgtaccaaagcaatgatttgattttataaggagttcttgatgcaattgtccactgcggatgagtagagacggcaatgttatgctggttgaaaagtgtgcaaaaagcatagatcggcgtcgcacaatggatattttttaatgatcataaattaacgtactgttatttaaagaaagtggaagtttgctacggcgttaaaccagaataaaattcgtttttcctccttcctgctagtgtaaaaatacagtttagagaaaattataatatatacagcttttctcgtacgttatagggaggggatgagtcattgacctgttattttctcctcgttatccttatgttttggttagagtattatcttctgcctgtgggaaatatcaggccatttcgcgtttgatgctgtcgcgttttctataaagggaaatcatatgttgagtacaagcaaggatgcaacaggtctgcggtttaccctgaatatcggtgatctgccagctgaaacattcgtcgtatcgggatttactctacatgagcaattctccagcctttttactctcgaacttgacgccgctagtgccaaacccagtgtggagtttcgctcagttctggataatgtcgctaccctgactatttggcgtgataccgaagtacagcgcatcgtcaatgggattgtcacctctattgaacaaggggatgcgggactgcatcaaacacgttaccggctcagcatccgccccgcactctggcgagctggtttagggcgacattcacgtatcttccagcaacaagattttctgcaaatcctggaaaccttgttaaagaaaaatagaattaacgactatgcccatgctttgcgcttccctcatgccgcgcgggagttttgcgtccaatataatgaaagcgatctggaatttatcaatcgcctggctgctgaagaaggcatttactatttctttgagcataacgatggtgcgcacacgctagtcttttccgatgattgtgccgcgctgaatgacgggccgatattaccctattatccgaatcaacaacaaagctcattcgatgagctctgtgttaccacgtttaagcgccgggagagtctgcgaccttctgatgtattgttaaaagactacacctttaaaaatcccctttggtcggcggaatatcgcgatcgtgctcgagatgatgagcatcagtcaggccgatattttcattatgattatcctggccgctacaaggcagacccaggggagtcctttgcacgttggcgattacatgcgctgcgtaacgatgcgcatcagggggagggggcgagtaattgcacggcacttcagcccggagtgcgttttaccttggaaaaccatccgttagacaccctgaatacacgttggcaaatcacccaggccacccatattgggcaacaacctcaagcattggaaacagcatcagggggacagggcactaccgttacgagccagtttgcgtttatacctaataatcagacctggcgtccgctttcactgccgaaaccgcgcattgatggcgcgcagatcgcggttgtcactgggcccgagagtgaggagattttttgcgatccttatggtcgtgtcaaggttcgttttctctgggatctttcaggaagaaccgatgacacaagctcttgttgggttcgtgtatcacatccttgggcgggtcctaggtggggaatgtcagccattcctcgtatcggccatgaggtgatagtcgagtttctgaacggcgatccggaccaacctgtgattatcgggcgcacctatcacgctaacaatctgcctccgggtaatttaccggcaaccaagacccagatgtcgatccgttcacaaactcataagggtgagggttttaacgaactgcgttttgaggatgagaaagataaagaagaagttttcatccatgcacagaagaatatggctatacgggtgctcaattctaaagatgagcgggtggaatacaaccgaagcagtagcatcgggcatgatgaagaactggccgttgccaacgatcgtaaagttacggtagaaggtaatcagcatcagaaaatcaccggcaacagcctggcgatgacggaaggcgatctaggtgtacaagtaaagggcgatctggcgcagaaaatcagtggtgtattcagcgtagacagcaatggcgatctgacgttgcagagcagtagcaaattgacgctgcgggttggcggcagtttggtggtagtgcatgctgggggagttgatattaaagggccatccattaatctcaactctggtgctagccccggggagttggcgataccggcggacccggcaattttaaaagcggcagccgctcaggggacgttatttgttgcgcattgcccgcaggaggataaacaaggatgaacgaggcaatgaactgggcgattgttgatgccgcagcagaaccagaattatttaccatgctggagctctatgacccgcctaatgccagtttgtatgcggagcccattgcagaagatattgggcgtttagccccttacttggtgcaaataaatgaaggtagccgtcagtggttgatgcatcggtccaccccctgggggatctggctggaaagcaaagccgagatgaaagcgttgcgtcaacatttgcgtaaatatctccatgtacaaattccggatgaggaaaaaccggtatttttccgtttttacgatccgcgcaatatctgggcgttattgcaggtactttcaccttgggagcaacatacatttctggggccggtagatgcgatagcaactcactggaaaggagagctgcgtgatgagcgttttaccgccctgagggaacagtttccatcagtgagtagctcccgtcgtaaaatgatgcggatatcccgtgaacagctagatgagttgagtttggtgtttgagaaaaggtatatcgacgggttggttgagaagatcgaagcctggagtgggcacgataggaaaatagaagccgcaacgatagcggaaaccttccgctggctgaaacagcaagggattgtggacgatcggagtatccgtgggttgttttctttgttctaccagcgggggtgtctggcgttggaaactattcccagcaacttcagacatgttctctgcgccgcaggcgaagaaggcggatataaagccgaaacgctgctgatccaggaattgggtgacgttcccctataataataaggatattgtatgaccagtttgccagcaggctcaccaaaatgtaattgtaaaaacccggatacgtgtattcactctttgacattgataatcgataagcgggtatatgaatacaaacagggtaatttcctctcaatggtatcggcaatcaataaaaccaaggaacctttgccattacagttatctctaacagggaaaagctgtgtttctcataaccccgaatgccctaaaggattaatatactctcctgagaaagagagaacgttgaaaaccttcactcggggaagtacgaattatgaagttaactatgacaccgataaagtgcataatctttcggggattgatgctgttgaatttattagtcgttatgtactagatcaaagtgcggtagattggttacctaaaggtcagtatattctacgtgttgggcaatgtcagggggcgccctttgttgataaaaaacttaatttttccgatggatttaaacagttgtacaatattgctccgagcgatcggctttggacgataattagtgtctatcctaattataaatgggaggtcgatctcactatagcggcaagcgaaaaagtgatagagcacagtgagcgagagctaaaggcggagcggcgcaggcaaaatagtgacgccggactgtcacaaagagatgcccgagggtggactacactatctaagtactcgattaccgatactttagaagctgttggaacactttcatatcagttaggtcaagaaccagaatacagttttagtcaaaacttaaaggcgaattttactaaaagagcaaaagaactatcaatattacaagatacaatgaaagccatggatgtagtgggaaaggctctatcgacgggggaaggctctggaactaagtataagatacttgatgcagtaattaaattcccaaaactaaaaattaatggtggagggacattggttgaggatgaaaaaaaccatcaggtctatatgaaaggtaaaatttctttagccctcgctcctttagtcgggcttgagattaagctggatttattgcaggcttttgctgcttggtatggtgtggcggctgttactgatgttatcagacaacaacttatagctcgtgaaaatgccgttaattcaggcaataatggggcttacgcagggctggagtttaatctgattgcctgcgtagaggctgcgttaacagtagcatttgaaagcaatgtgaataaaaagtgggattggagtgtagaagggacgaatgaggtccaaatgacccttttactaaaggctaatgccagggccggcgttaaattttattgttttgaaggtgcttttgtagttgaaggtgccggaactgctgtgggaatagttgcatttgaccgaacaccgcagggtagaattgaaatgatattttatcataagggcattagaattgaggttggagcaagtgttactgctggggtttcaaattcaggcaataaatcggaagaggactcaagtcgtgtaatggttcaatcaagtaaaagtgatataaattaccaacggaaaacgggtgttaaaaatggatgggtattacatgaagctttggaaaaaaaagactcaaaacatcgtattaatatattttaatttttgttttttagttttcttttgtagtgttttttctttaagggctgaacagatgagtgagattaaatatttggcagaatttagaacgcgtgaaagcgcatgtatgatgagagttaatggtttctctcttgttgacaactttggtacgtctagtggaactatgacaacagggcttaatttaacggcttttttggagaatggtaagaatagtattgaattattaatgggggcgatggatcctaacgatgacaaaacacttcatgccgattcctcgtgtatacttgtcattacacaggatactaaagatactagtatgcaggtaacatcaatacagttgaccgttgataaagatagaaagatagatgcatcaacatcaccaaactatcgtgggggaacatctgaaacagctattgatgaacaacaacttccgagtgatgacgagctaaaaatgcatcgcgctgccagaaatgttattcttgaccatattcctgcatggcaatgggtaagtgcaaagcctgtaaatgatgggtatattcctgagatcaaggctgcttacacaaatatttggaatgccatgagtagcagaaatgttgacgccttaaaaaaactatcggaaatttctaataaggaaatgggtttggctgaagggatctcttctgatactgtattcgaatcttatgatttgcctcgaaatatacttgataaaacattatcaccgattcctttaacatgggataattatgttttaaaaagttactgtggagggagggtgtttagattcataaaaggaattaaccaaaactcacctttacgcctaaggaatgaagagaaaagaatagtttattcatataatccctacttttctatcattgatgggaaagtcgttatcgtccgatagtcacgaataagggattgtggcaattcattggattgctacaatgtagccataaaactagtttagagggaactcaaactatgggtaataccgttaaaattggtgataaagataccggccacggtagtcatccgcctacacctgtcatcactggatccacaactgtgagggttgatggtctgccattagctcggaagggcgacgttttggctgctcatgggcatgaccgaaatatcagcggggggtcatccagcgtctttatcgatgggcaacccgcagcgagaacgggtgatgcagtcagctgtggcggtgtactgattggcggtggttcggtaaatattggttagttttcatatgatcaaggggttgccttccttgctcgggccgaaagttcagcatcgttcggcctgtttgattacaccagtttcaattgtttacggcaagggtaccctaccatcgtaatctatccgtttttacttagagataagtgccacagaacatccgcttaaattagctgtcataatgcagcaatgatttgattttataaggagttcttgatgcaattgtccactactcacaccctggaagggtttaccatcacagaatattgcggtgtagttaccggcgaggcgattctgggtgccaatattttccgtgatttctttgctggcgtgcgtgatatcgttggtggccgttccggtgcctatgagaaagagctgcgcaaggcgcgtcagttggcctttcaggagctgcaggagcaggccaaagaactgggagctaacgcggtagtcggcatcgatatcgattatcaaaccgtaggtaaagatagcaccatgctgatggtcagcgtcagtggtaccgcggtaaaagtcagccgctgacattcaccgacaggcgcacaacgctgctaagcgggtgctgcatgcggtgtcaccacggtcaaatcataccctgataacccggcaacggtttgatacaactgccgccacacccaatcttgcaaggggcggcggtagtcggtcattgattaattgatgttacctgccatgcagcagcgccccttatcttaacccactttgtgctctccttttctcaccggcggatgttccggtggccgtttaatcgggtcggtgtgatgtgcaagcactggggcctgaggttggtggagttgcggcgctggcactctcggatgcactggtggagctattgctgaatgctcaacaggtggtgcatgaaaaacggtttgtttttcaggagccacaggctgcttgataggattattgaccaaggcgtgcggatggtaactcggtggcagtggctgggtgttgggcctgctaaccgataccggctgatgtaccactggagtcacatggaaattaggtgcgatcatagggactttggcatggggcatggtggcggcaggcccaaagtgaggcgctgacaggggagtgccgtttgatgacggatgcgccatcgccggtgtggcaaagtgcggcagttggccgttattgacctgcaccggtgagttgtagcggttatggctgtcgtaatgattcaccgtattgtaacggttaacgttattgtactcattaacgttgaccaccgtggtgttatgaggaacgtagggctggttgttatacatcaccggctgatatctgccattgtcatgcctgccccagtgcacatcccagtcgttccaaccgtggtggtgatcgttgattaacgcaccgagcgcaattccggccccaaagccgatgatgccggtagccagcatctcgccgccgctgtagccagcgggggcggcgtaatggtaaccaggataaaccggtactggttcgccataggcttcccaagggttgtaatagggcacatacaggacatccggttggctaggctcaatcactatggtttgcggcggggccatgaccagactctgcggtgcgacatagtcagggggaactgcagagacgacaacccgctgctgctgcgtatttttcaacgtccccttgtgtgcagcacgttggcgcataacttgaatagcgttcataacgtcggtgggatcgttgagataagcgttgcccagttgtgtcgtccagggaatatttttcgccatctgatcaataatatctgggaatagcaccaggctgcgaacgctgttgtcccaaggttgagcatcggccgcattgctcaacgcggcaggttgcagccccggatgttgcgctagccagttattggctgcgctgatctgatcgggatactccgcactagccagcacctgagccagtaatttatccgggaacagcgcgatggggctgaccaactggtaaagttgatctgcactcaatggtgtgtaagcctgaggtgcggttgccgcaggcattgaaggggaagtcgctggtgttgtcgcagcggtgtttttttgatcgcaaccactcagtggtaacagcgtgatggctaccagacaggctaaaacgcttggcttaaacatgattgactccgcttcttgcatgccggtgatactttgaggctaacacgtcggcagtaacttggtggccgggggtaacactcccttgcaaatcaggggagactgtcatggtttgttgattaactgggtgatttgatacaggttaatcaaagtcggttacatatggccgggctggccggtagaagataaatacagggagcaagaggtgaaaatcagagcagggatagtggcgcttatgctgctgtcggggtgccaaagttctcagcacaacactgttatcgatcgcggtagctatcggttggaaaccctgcatcaggcaccaggggccgatcagcgtatccgcttcctggtgatgcattacaccgcagaagattttcactcttcgctgaaaacgctgacggacgaacatgtcagtgcccattacttgctgcccgcctatccgccgctgcagggcggcaaaccggttgcgtatcaactggtgcccgaagcgttgcgagcctggcatgcgggtgcgagcaactggcgtggacgtaccaatttgaacgatacctcgatcggcattgagatcgtcaaccggggctttacccgtaacatgctggagacagactggcagccctatacgcccgagcaagttgcgttactgatccaacttagccgcgatattgtgcagcgttacgcgctgcaaccgacagacgtggtagggcacagtgacatcgccccgcagcgcaagcaggatcctggcccactcttcccatggcaacagctggcgcaggcaggcattggtgcctggccggatgagcgggaggtggaacgttatctggctggtcgtgatatgcatgagccggtggtgatggcatcgctattggaaaagctagcgcgctacggctatggcgtcgatcccacatgggatgccaagcagcagcgcaatctggttgcggcgtttcagatgcatttccggcccagcgattatcgcggtgagccagatgcggaaagcgaggcgattatagaggcgttgctaagcaaatacggagctatgcgctaacgccaaaaaatgcctcatcctcccacagggaccgatcgacgtgggtttgaaaattcggtgctgcactttggaggtggtgctctttggatgagtaggcgatcaagtttgccgagattatctttttaccgccaaatgtgcagggactatcagctccctctccctgtgggagagggttggggtgaggggccgttatagcccgtgcagattaccgtgttctttcaaccaacgagccgtacggctaatgccttcctctagcgaaacctgtggttgataacccagctcctgctgtgcgcgagtagtgttcagcgtcagatcgaaattgagcttggcgacgctgtaatgggtcaacacgggctctttatcgcttttactgcccagtttttccataccacgcgccatcatatccagcattgggtagggcaccgagcggatgcggcacttcatgcccaactcatcgatcaactgttgcagtacggtgcgtagcgtgcaggcttgctgattggagatattgtaggcccggccagaaggagtctcttccttcacggtggccagccacatggcgtgtaccgcattatccagataggtcatatcgaccagagcatccccgccacgtggtaacagcaggctaccgtagtgtttgatcatatgcagcaggcgcggcagcatgattttatcgtgtgggccaaatagcccctgtgggcgcaggatagtgaaatgggtttgcggattggacagcgccaactgttgcaccacctgttccccggcggccttgctgcgggcaaactcgttggcataacgaaccgggcggaagtcttcatccacattgcggtgatggtgataatcaaagtaaatcgctggcgacgaaatatgaatgaatcgttccacaccgtaggccgcagcccattcccccaagcggcgggtagcgcggacgttggccagttcgaaggcttcttccgtgccccatggggaagtgaaaccggagcagtgccacagcacgtccacatccgccaacatggctttggcctgcgaagagatcaggttggtgagatcggcatggatgaattcggcacccattttttccagcaggcaacccatagcctgattgcgcccggtggcacgtacttttatgccttggcggcggagatattcaacggcgttacggcctaacccactggttgcaccggtgaccaataccttcataactcactctgttctcaccaaaaatcaggatgctgagggcgttttagcgcgccccagcaaataagatgccattctttcgtgattttgtgcgctatgcaatgagaaaggacctaaccgaggcagcaaactgtgcggttgatcgacaaatagactattgaggacgctggttatcgtactcttcggccaattgggcaatccgtttggccataccgcggaaaataaacaggtgcgcgggcatcatgacaaaccagtataacagcccactgaaaccggcaggatgccaccaggcgcgcacatcgagctggcgacgatcgcccaggtctttgatgctgaaggtcaggcggccaagccccggtgctttcatcccgaacatcaatgccaactgccgtaatggcttcttggtgatcactttccagccatcgaccagatcgccgacttccagtgtgtcacgctgcggcctgccatagacgacgccgttgccgatcatatcgtccatgcgggcgcggatttgccacaggatgttggcgtagaagtatccctctttgccgcccaactgctgcacgacatgccatagcgcttcactcgaggcctgcgtatccagctcacagcccgcatgtttgggatagaacccataaccggggcgccagcgtgctcgggcttcaggatcgtaaccccagtcggcagagtcgaccacctcgtcttcgcggcgtagcgtttccttaaccgcctcatcaaaggtttgtagtggctgtgggatcaaggcttgcagcggtttgccatcggcaggtaagtcatggttcagcccctggatgagcgcgctggcaatcgaggttggcacagaggtgatcatgctgataaaccatactgagataaagcgtgtcggcagcggcaccgggatcagccagcgctttttgccgctgatcttgataaagcgctcaaacatggtttggtaactgatgtactccggcccggccacgtcaaaaatccggttttcctgcgccgggtgttgcagtagtccggtcaggtaagtgagcaggttatccagtgcgaccggggacgattttgagcgcacccaacgcggcggcgtcaggattggcaggttatagaccatatcgcgcatgatctcgaacgcggctgaccctgggccaaccacgatgctggcgcgtaattcggtgacgggaatgccgctttggcgcaggatttcaccggtcagcttacgggcgatgaggtgaggggagctactgccctctggttgcagtgcgccaaggaaaataacctgtttaacgttggatcctcgcaaggcatcccgcaggttctcagccgcctggcgttccttttcgataaaatcatcgccatcgcccatgccgtggatcaggtagtaaacggcatcgatctgccatagcgccgccgttagcgtttctggacggtagacatccacgtagcggcagcttacgtgcggccagttttgctcttccaaccattctatgcggcgtgctgctgcggtgatttcgtggccctgttcggtcaaccgggggatcaggtgttggccaatataaccgctggctccaagaaccagaatacgttgggaggtcattgcgctgccttagtttattgatgttaatgtgagcgtagctttacccgtcgtctttcaagctgcggcttgaaatccatagggcatagaatgacaaattagcgggctaaatgcactttttgtatgggtatcagtagttgcatctgcacggagggcggttcacactacgcggcgatcaagcaacgagcccatgcccgatgaaaatcaattccctgtgttatttgctgctgctaattgccctggctggcagcctgtgttttcccgctccgctgtggacgtggttgctgctggtaaacctgctgaccctgctgatctacggtgccgataagctggccgcctgtaaaggttggcaacgggtgccggaaattaccctgctgctgttcggcgtgctgggcggttggataggggccattatcgggcaacgactgttccgccataaaacgcagaaacaaccgttcaaaacctattttatcctcagcgtagtgctgaatctgctgctgatactggctgtgggttattggctctatggccggatggtggtttgagttaccgtaatgtgcacaattaaacgggcgccgcatgcgccgcccgttgtcctcaatcagcgttaaggtttcttctcgccgactaccactggagcatattcaaccggcacccacgcatagcctttaccttcgacgcgcacgtggcccaagccagggaaaggtaagtgcgctccgccaacccacagtttgttttcagccgcatcggcaaacactttctgccgggtagcgatcgcctgtttggagtccgtgtcaaagtccactgcgacttcaggtttggcaaactgcaaagagtggctgtggacgatatccccccacaacagcagtttctggccgccggagctgaacagataagaggcatgcccaggcgtatggcccggtgtcgctatcacctccagccctggaagtaactgctccccagggctgtacaatttcagcttgctctgttcggcataaggggccacggcgtcttgggccatcttgaacatcggctgcgcgtttttgggggctttgagcgccatctctttactcagccaataatctccatcggccttggaggcatagacggtagcgttagggaaggcagccttgccctgatcggtgatgccgcaggcgtgatcggggtgcagatgcgtcagcaatatcatatcaacctgctctggctgataacccgccgcacgcaggttgttcttgatcgcacccaacgtcggcccaaaacactgcgaggtaccggcatcaaccagaaccagatgcgtaccggtattcaccagaaacgcattaaccgccgtctgtatgcctgacttgctgtcggtaaacatgcgggcgaacaacttttgcatatccggctcgctgaccccatggaacaactttgtcgcaagatgggtataaccgtcgtatagcgccgtcacctccaggttacccaacatcatgcggtaatagccgggagcctgcgtttgctgttgggctggcgccggggcggcgttggctggcaaggtaaacatcattccactgctaacgagggtgagagctaatagcgtctggcgaaatttatgactcaaagatgatatcccttcaggtattggaactaggctgagatcgcgagtttggcgagaaccgggaagcggggcctcccggtgttactacaaaaaagttaggcgtgctgctgcaagaattcccgccacagatcgactactttttgcagatcctggcggctaacgttgagatgcgtcaggatacgggtcaacggcccggcactgatcaacacgccacgttcacgcatccaggggccgagtttagccgccagctccggggattggcgcaggtacagcacgttggtttgtgcgcccggatcggcaatatccacgccaatgtcacgcaactgctgttcgagccatttggcgttgtcatgatcttctttcaaccgctcgacgttgtgctccagcgcatagagcccggcagccgccagaataccagcttggcgcataccgccaccggtcattttgcgccagcggttggcacgttgaataaacgcttcgctaccgcataacagcgagccaaccggtgcacccaggcctttcgacagacaaatggtgaaggtgtcgcaatactgggcaagggttttcagcggcacgttaagtgccaccgccgcgttgaaaatgcgcgcgccgtcaatgtgcagagccagcttgtgttcacgggtgaactgccaggcctgttgcagatattccagcggcagcacgcggccgctgatggtgttttccaggcttagcagacgagtcttggcgaagtgaatatcatcaggcttgatggcggcggcgactttatctaacggcagcgtgccatcaggattggcttcgatcggctggggctggatgctgcccagcacggcggcaccaccggcttcatatttgtagttatgcgcttgctggccaacgatatattcctcaccacgctggcaatggctcagcaaggctaccaggttggcctgggtaccggtgggtaggaataatgccgcctctttgccagagagtctgaccgcttcggcctggagggcgttgacggtgggatcatctccatacacgtcgtcgccgacgtcagcctgcgccatggcggtgcgcatctctgcgctaggttgggtaacggtgtcactgcgtaaatcgataagcatacggatccttggtagccgatgaggaagaggctttcatcataaccggattagcgcagggcaaaagcggaaaatgcaggggacaaccaacttgattgcccccagaagcgattaacgcagccagttggttttagccagttcgacgacctcatcaccccggccgttgatgatggcgcgtagcatatacaggctgaaccctttagcctgttcgaatttgatctgcggcggcatcgccaactcttgtttggccgtgaccacgtcgagcaaggccgggccaggatgggccagcatttcctgtaatgccgcgtccagctcggaggccttttctacccgaatgcctttgatccctgccgcattggcgatggcggcaaagtccgggttgtgcagatcggtgccgtcggtaaggtagccaccggccttcatctccattgccacaaagcccagcacgctgttattgaacaccaccaccttgaccggcagcttcaactgggccagcgacagaaaatcccccatcagcatggtaaagccaccgtcaccgcacatggcgatcacctgtttatccggttcggtggcctgagcacccatcgcctgcggcatggcgttggccattgagccatggttgaacgaaccgagcaggcggcgtttgccgttcattttcaaataccgagctgcccacaccgtcggcgtgccgacatcgcaggtgaagatggcgtcatccgtggctgagttgctgatttgctgtgccagatattgtgggtggatcggctggtcatcgttcgcagtagccaacccgtcgagatctttacgcgcttcccggtaatgctccagtgccttatccaggaacttgcggtcgctcttggcttgcagctgcggcagtaaggcgctgagcgtcgttttgatatcgcccatcagcgccatattgaccgggcaatgggcaccgatgctgccggggttgatatcgatctgaatgatattggcatgggtaggataaaacgcccgataagggaactgagtgcctagcagcaccagggtatccgcgttcatcatggcgtgatagccggatgagaaaccgatcagcccggtcatgccgacgctgtaagggttatcccattcgatatgctctttaccgcgtagggcgtgcacaatcggggcttgcagcagttcggccagtttgacgacttcgtcatgcgatccggcgcagccgctgccgcacatcagggtgatttttttggcgctgttcagcgtttctgccagtttctgcagctcgctcatcggtggctgcatcaatgggtgcgcaggcgtatgccacaccatgctggcatcttctggggccatttgcagggcgacatcccccggtagcacaatcaccgagacgccacggttgaggatcgctttgcgcatggcaatctcgagtactcgcggcaactgctcaggattggacaccagctcgcagtaatggctgcattcgcggaacagctcttgcgggtgagtctcctggaagtagccgctgccgatctcgctggaaggaatatgggctgcgatagccagcaccgggacgtgattgcggtggcaatcgaacaggccgttgatcaggtgcaggttgccggggccgcaggagcctgcgcagaccgccagttggccggtgagctgcgcttcggcaccggcagcaaaggcggcgacttcctcgtgacgggtgcccatccaggcgatagttcccatccgatgcaggctgtcactcaggccgttgagcgaatcgccggtaacgccccagatccgttttacacctgcctgttccagcgttttggcgatcagcgtggctactgtttgcttcatcgttcctccagtcattatccaaaatgaggggtactcgcccggttagaggcaaacagaaagtgtagaagggcattaggggacacgcttatcgatatgtgccccatcgggaagatggggcaaagcttcaggcgagggtgacgtcactttgtagctggcaactacaggccagcacgtaaccctgttcgatttccgccggggttaacgtcatggtgctggtggtggtgtattggccatcgataatacgggttttgcacgaaccgcaaaccccagcccggcaggcggcattgaccggtaacttatgggcttccaacgctgccagcaaggtgctgccgaccggcacgcggaattcacgcagtggctgaccgatgcgcaatgttaactgttcgcttttcccatcatccggctccgccgaggtgtggaactgttcctgatggaagttggcagcggggacgcctagccccaggcaaagctgctcaacctgttgcatgtaaggggccgggccgcaggtcatgacggtacgtgaggtaatatccgcggcctgttgcaacacttgctcattgatgcggccagacaggaagccgggttgtgcatcctgctctgccatcaatgtcagttgcaattgtggatgggcagaacatagccgttgccactgttcggcaaaaatcacatcggcaggggtgcggacgttaaagatcacccgaatatcgcattgcggtttgttcaccaccagccagcggcacatcgacatgatcggtgtgacgccacagccggcagccagcatcagatagctatcgctggggtgttgcacgcaactgaattctccctgagcgtctgatagccaaagtgtttgaccagggttgacctcttgcgtcagccaacgtgagccgaggccatccgccaggcaacgtacgctgatgctgataaaaggactcaggccgggcgaagaggagagggtataggcgcgcagcgtgtctgcactgtcgcgaatgctgactaacgcaaactgaccgggctgataaggataaaagtcgttattgatcaggtttagcgtccagacgtcggcagtttcctgttgcagggagtgcacctgcatcgggttggggcaaagtgggctgggttggctcatagggcacctcacaacaaacggggccgccgcgatgggcagccccggaacaacggccttagccgagaagggtttgcatatcctgctctacggtagtaaccgaacgcaggccgaatttctcattcagcaccgccaaaagattatcggtcaagaaggccggggcgcttgggccggtgacgatatttttcacccctagcgacagcagcgtcagcagaataacgatcgctttctgctcgaaccacgacagcaccaggctgagcggcaggtcgttgaccgtgccaccgactttctcggcgagtttgaccgccagcatcacggcggaataggcgtcgttacattggccaacgtccagcaggcgcggtagcccttccagcgtgccgaagtccagcttgttgaagcggtatttaccgcaccccagcgtcatgatcaggcaatcttgcggcacgctgcgggcaaaatcggtgaaatagctgcgttcgtcgcggctgccgtcacagccacccaccagaaatacgtggcgcagttttttctgtactaccagatcaaccacggtatcggcggcgctgagtagtacctggcggccaaaaccgacggtgatcagttgttcgatttcgctgtaagggaagccagccaactgttgagcttgagcgatcacggtgctgaaatcatccccttccagatggttgacaccaggccagccaacgatgctacgcgtccagatgcgatcgccatagttgccgacgttcggatcgataatgcagttggaggtcatgacgatcgaacccgggaatttggcaaattcggtctgctgattttgccagccgctaccgtagttacccaccaagtgtgggaattttttcagctctggatagccatgggccggtaacatttcgccgtgggtatacacgttgacgccggtgcctgcggtctgttccagcagcaagcgcagatctttcaggtcgtgtccggagatcaggatcgccttgcccgccaccgggcgcacgttgaccgtggtcggctgtgggtcgccaaaggcactggtttcgccgcgatccagaatagccatcacgctgaagttcattttgccgatggccatcgagttgttcagcagggtgtccaaatcgctcggttgggtgcccagccaggccataaaggcgtggtaatcagcatagatctggttgtcgaactggcccagcacatgggcatgttccatataggcggcggcccctttcaggccgtacaggcacagcatccgcaggccgtggatatcgtcgcctacctcggctttatctttattgagggcaaactgcgcagcctgttgcaacagcgcaggcatatcgttgccggccagttgcaactgggccagtgggtgatcgacctgcacattggcatcgagcaggcggcagcgaaccgccagcgaatcacgcagggcaatggtgtcacgtgcatagccgataatgcgttcggaatcgaagttaacgttggtcagcgtagagaagaaggcgcgtggggagaaactgtcgacatcatgatcgataatgcccaacgcgcgcgcctgcaaggcccaggcagagagcccttgcagcgctgctatcaacagatcctgcaggtcggaggtttctgccgttttgccgcacatcccttgagcgtaggagcagccgttacctgccggtgtccggatggtttgttcacattgcacacagaacataatcgcttccttttttaaagttgcatttataatgcttgttttgaagcatagatcgacggtgcaaccttaaaaaggcttttgtgatacaactttaacaaagtttgatttagaacaagttggcgtgcggatgggaattattacgctttgactaacaggcgcggcaggccgcgcccgtaggcgtcaggagaacagggcgattaataccggagccaacaggctcagcaagaatccgtgcacgatggcgggaggcaccatttctatcccgccgctgcgttgcagaaccggcagtgtgaaatccatcgaagtggcaccacataaacccaatgcagaggagcggctacgacgcaccagcgtagggagcagcattattgccaccagctcacgggccagatcgttgaagaaggcggcgctgcccattaccgggccataggcgtcggtgatcaggatgccggaaagggagtaccagccaaaccccgaagccatcgccaaaccggctttcagcggcaaacccaacagcagtgcggccactgcaccacccgccagcgaactgaccgccaccaccagggcgaccatcatgccacggcgattgagggcaatctggcgcagcgtcatcccactgttgcgtaactgtgcccccaccagaagcagcagaaacagcagggcgtattcactgccttgacccgcaaattgcagccagtgccactgggtgaggcccaaggcaaagccccccaccaccactccacagagcttcagggattccaatgccatatgcaggcgtgagggcaacgtttcttgcttgtgagtactgtgccaagggcggcggcgttcaaacaaagataaccacaggagattggcgcagaaaatgcacagaaaaaacaccagggtgtactgaaagatcagcatcaggttgctgctgaggttttccaggaatgccaggctgatccccataatgaacaggatcacatacaccatccagctcagcaggcggttaatggcccggatcagggtgacgctacgcaaggggacaagataaccgacaatcagcggtatcaaaataatcagcagtcctgagtacatgtgaaacaagcgtcctttaatctggaggaagtgcggcaaacctaacacgctaaccaaaatgggctaaggagtaaagtcgcgtatttacgtggtttgcagcacgctgtagcaatgtctgcttgacctgtaatggctttattgctcatcctcaaggtatcaggcgaataaaggagtcagcagatgtacctggagcgtattgagattgtaggattccgcggtatcaaccggctttcactgacgctggatgataataccgtgctactcggggaaaatgcctggggcaagtccagcctgctggatgccatgacctttttgctggcccccgaacagacgctgtatcgttttgaagccaaagatttctacttcccacctggcgacgaggcggccaaagatcgtcatttgcagatcatcttcaccttttgtgaaaaggataccggccatgcgcatctgccgcgctatcgccatctttcgccgctgtggtcgaagggggaagataacctgggccgcattcactattgctgcgaaggagaactagacgatgatggcacggtatgcacctggcggcgttttcttgatgccgatggcaacgccttgcacttgcaccatatcgatcaactggtacatgccctgatccgtattcatccggtgctgcggctgcgtgatgcacgttttatccgccgtctgcggcccagctcactcagcgatcgcctccctgccgataacgaagccctggcacagcagttggatcaactgacgcgtgaactggtgcgtaacccgcaaaagttgacgaactccgaactgcggcaggggctagcggcgatgcagcagttgcttgaacactattttgccgagcaaggttcgcaggttgccgggcctcgccgccatcgtcagccgccggaacagcaggcgtggcgttcgttggacagcatcaaccgcatgattgcagaacctaacagccgcagcatgcgattgatcctgttggggatgttttctacgttgctgcaggccaagggcaacgtaaaactcgatccccatgcccggccattattactggttgaagacccggaaacgcgcctgcatcccatcatgctgtcggtagcctgggggttgctcaaccagatgccgttgcagcgtattaccaccaccaactccagcgaactggtgtcgctagtgccggtggagcatatttgccgcttggtgcgcgaatcggcccgggttgctacctatcgccttgggccaaaggggctaagtgcggaggacgggcggcgcattgcgttccatattcgctttaaccggccgtcctcgctgtttgcccgttgctggctgctggtggaaggggaaaccgaggtctggctgctcaacgaactggcgcgccagtgtggctatcgtttcgagtccgaaggcgtgagggtgatcgagtttgcccaatgtgggctgaaacccttgctgaagtttgcgcggcgcatgggcattcaatggcacgccctggtagatggtgacgaagcggggaagaaatatgccaatgccgtacgcagcatgctggataatcacgaagataacgagcgcgatcgtttaaccgtgctacctgcgccggatatggagcatttcatgtatcgggagggattcagctcggtctatcaccgggtggcttcggtaccgctaaaggtacagatgccggtgcgtaaggtgatcctcaaggcggtgcatcacacttcaaaacccgatctggcgattgaggtggccatgcaggccggggcgtggggcaccgactcggtgccaccgttgttgaagaaaatgttctcccgcgtgatgtggctggcgcggggccgggcggattaagaaaagtgtttgctgatcccctgttggagctcatccagtaactggtaacggcggcgatattccgcgcgttttttgctggcgatggtttccatcggcttgcggccaatgcgctcgggtaacaggaaatagccgttatcgagttgcttgccgcccatggaaagccagaactgatcgtaatcagcatgcaactggcttttctttttgtggtggtagcgccagttttggtaaatatgggtggtgttgcctaccgcgatcaactgccggatacccaactgttgggccaggtggcaaatgccttccaacaccaggcgttttggaaacaggccgtggcaggctttggtcgtattctggatctcagcgtgcggcaccgtggaattggcgccttgcataccgccgataaataacgtgggttgttgctggtaaatcatcaaggtgaaggtcatttcagccagcatgatcccttggctattgcgcaacagcagggttgtttcaccctctttattcaaatggtccagagaggccagttgcaggcagatgtgctcgccatttttgtcttgtgcgcggcttaaggtaaagggattgctacccagttgcccgaggtgcatcttcagcggcatgcgttgggcgagcagatcgtagtgatcgcgcagggcaaacagacggtcgatgcggctcatgttgttcgccagataggggcgatgcagtttgcaaggcagattgggctgtgcgtttaaaatctcatccaacagagggttggcagccagcgtattaagcaggctgcgagtcgtgggccagcagagcagcgaacggccaagaaacttaaggcggaatgacgtttttttccaggcattgctgggcactttctcgccgttgatcagtgccgtcatcagttggctggccggtttggccgatatgagtggatagctgagctgagacatgatgaaatcctggtttgtgtctaaatgactatttcatcaaggtttcactaaacaggagttcaatacggcatggcaaaactgcgttgctcgaaatacgttgagcctgggtttagttatcggaaacgcaacatgctaatttacttgggttgccatggttggcagcctgagaatgacaggaaataggtaggaacaaacattgacgtggttattcaaaagtaagaaacgcgggttgctggtgtgtgccgttctggtggtgcttgccgctgtggcttattggcactttagccatccggccccggtggagtttaaaaccgtcaaggtcgttaaacgcgatcttgagcaaagcgtattggcaaccggccaactggacgcggtgcgtaaggttgatgtgggggctcaggtcagcggacagttggagagcctgaaggtcgagcttggcgatacggtgcaaaaaggccaactgctcggcattatcgatccccagcaggcgcaaaacagcattcgcgaaagcgaagcgacgctgcagcaactgcaagcccagctgcaacaggctttggcagagcagcaactggcggaggtcaccttgcagcgtaaccgcgaactggccaaggtgcaggcggtatcgcgccaggatctggatcaagtcgccaccaatctggcggtgaaaaaggcgcaggttgcgaccaccagagcggagattgccaaaaatcaggccagcctggatacagccaagatcaatctggcctatacccgtattgaagcgccgatggacggagatgtggtacagatcaccaccttgcagggccagacggtgatcgccgcgcagcaagcgcccaacattctgacgttggcagacatgagtaccatgctggtgaaggcccaggtttccgaggcggacgtgatccacctcaaaccggggctgaaagcctggtttaccgtgctgggggatccgagcaaacgttttgacggcgcgctgaaagacattcagcccacgccagagaaggtcaacaacgccattttctattacgcgcgtttcgaagtgccaaacccacagggcttgctgcgtctgcaaatgaccgcgcaggtgcatattcagctggctggcgtcagcgatgcgctggtgatcccgctggcggcattgggggatcagatcgccgataaccgttaccacatttcggtgctgaaacagggcaaggaagagaagcgggaagtcacgatcggcattcgcaacaatgtggatgtgcagattgtcagcgggttgcaagccggtgaagaagtgattgtcagccgcggcggcgcggaggccagctgatgacggcactgttagaactgagtgatatccggcgcagctacctctccggcgatcagaccatagacgtgctgaaaaatgtcagtctgcgcattgatgccggtgagatggtggcgattatgggggcttccggctccggtaaatcgacgctgatgaacattctcggctgcctggacaagcccagcgccgggacttaccgcgtggccgggcaggatgtggcaacgcttgatggcgatgcgctggcccaactgcggcgcgagcattttggctttatcttccagcgctaccatctgctaccccatctgagtgcggcgcataacgtggaggtgcctgcggtttatgccgggctgggcaaggcagcacggcgcgaaagggcggcggctttgttgcaacgtctggggctgggggaacgtatcaactaccggccaagccagctttctggggggcagcagcagcgcgtcagtattgcgcgggctttgatgaacggtggccaggtgatcctggcggatgaaccaaccggtgcgcttgacagccattccggtgaagaggtgatgacgatcctcaagcaactgcgcgagcaggggcacaccgtgattatcgtcacgcacgatccagcggtagcacaacaggcagagcggattatcgagatccgggacggtgaaatcatcgccgattctcggccacaggcgcagggtaacccgcaggccaaaatgctggatatggccacgccagcgccttcctggcagcaggtagcgggtcgtttccgtgaggcgttggtgatggcttggcgtgctatggcagccaacaagatgcgcacggcgttaaccatgttggggatcatcatcggcattgcctcggtggtctcgatcctggtgatcggcgacgccgccaagcagatgatcctggcagacatcaaatccatcggcaccaacaccgtagacatctatcccggcaaagactttggagacgatgatcccagcttccgccaggcgttgaaatatggcgatctaggcgcgttgcgtgaacagccctatgtcagtgcgctttcgccgaatatcagcagcagcatgcggctgcggtttggcaatattgatgtggccgccaacgtcgcgggcgtcagtgaacaatattttcgagtatacggcatggcgctttctcagggggttggtatcgatgcccaacaggtgcaatctcaggcacaggtggtggtgatcgacgccaatacccagcggcggctgttcccgcataaaaaaaacgtggtgggtgaggtgatcctgatcggcaatatgccagccacggtagtgggtgtggcgcaggaaaaacagtcgatgttcggcagcagcaaggcgctgagcgtatgggtgccctatagcacgatggccaatcgcctgatgggcaacgactattttgactcgatcaccgtgcgtattcgtgaaggctataacagccaggaagcggaacagcagttgacgcggttgctgacgctgcgccacggcaagaaaggcttcgttacctacaacatggatagcctggggcaaacggcggagaaaaccacccgtacgctgcaactgttcctgaccctggtggcggtgatttcgctggtggtgggcgggattggggtgatgaatatcatgctggtctcggtaacggaaaggacgcgtgaaatcggcattcgcatggcggtgggcgcgcgctctggcgatgtcctgcaacagttcctgatcgaggcggtgctggtctgcctagtggggggcgcgttggggatagcgctgtcgttcgcgattggcctgttggtgcaattggcgatgccgggctggcagatcagcttcccgccggtggccttgctgagtgcgttcttgtgttccaccggtataggcgtggtgttcggctatctgccagcacgtagcgctgcgcggttgaatccgattgacgccttggcgcgtgagtaacagcaaaaataaaatgccagtcgtacggcggctggcattttgagttggcagtgcagaagtggctgaaggggcgcgtttaggccattgcctcgctttccagcggcataatcaggctcgcgtggtttcctttcggcccttgatgtacgtcgaacctgacctgctggcccgctttcaacgttcggtagccatccattttaattgttgaataatgcgcgaagatatcttcaccgccgccttctgggcagataaagccgaaccctttggcgttattgaaccatttaacagtacccgtctccatgctgctacatccctcgcaatgctatttttaaaatgagatgaataactgatccaggtgagttccaactggtcaaaagaccaacaactcacaaaattacactctagagcaaatgatcaacacgtcaagggatcggccaatgcccgtgtcgggcagttcactaaagtttgaagtagttaacgctattgatatggtttggtaacaaattgtggctgcgataggggcgattaatcgcgttgtgctgcggcacgttaaccgcgaagatggtaaaatagtcttgatactcccgtttgaataacccgaacatggccccatatactgaggcatggcagagaagatgagcagcaatgggcaatagcaacgattggctaaatattgaacacttggccgaagaaaaacaaatcgatgcggtaaaaccgccgtcaatgtataaagttatacttaacaacgacgattacacaccgatggaatttgtgattgacgttctgcaaaagttcttttcttatgatattgaacgtgcaacgcaactgatgctcacggtccactatcaaggcaaggcgatctgcggtgttttcaccgccgaggttgcggaaaccaaggtggtccatgtgaaccgttacgcaagggagaatgagcatccgttgctctgtacgctggaaaaagcctgaaaaggcaatctattggggaggtgcctatgctcaatcaagaattggaactcagtctcaacatggctttcgccagagcgcgcgagcacagacatgagtttatgaccgtggagcccctgttgctggcgttcctcagcaaccctgccgcgcgcgaagcgctcgaggcttgtacggtggatctggccgcgttacgccaggagctggaagcctttatcgaacaaaccacaccaacgctgcccaccagcgaagaggagcgcgacacccagccgacgctcagcttccagcgtgtactgcagcgtgcggtattccacgtgcagtcctccggccggagcgaagtgagcggtgccaacgtgttggtggcgatcttcagcgaacaggagtcccaggcggcatacctgctgcgtaaacacgacgtcagccgtctggacgtggtgaacttcatttcacatggtacacgtaaagatgagccgggccaggcacctaatgcggaaaacccggtaaacgaagagcagcctggaggggaagaccgtatggaaaacttcaccaccaacctcaaccaactggcccgcgtcggcggtatcgatccgctgattggccgtgaccgtgaactggagcgcgccattcaggtgctgtgccgccgccgtaaaaacaacccgctgctggtgggggaatccggcgtaggtaaaaccgccattgccgaagggctggcgtggaggatcgtgcagggcgacgtgccagaggtgatggcagactgcacgctctactcgctggacatcggctcattgctggcgggcaccaaataccgtggcgacttcgagaagcgcttcaaggcgctgctcaaacagctggagcaggataagaacagcatcctgtttatcgacgaaattcacaccatcatcggtgccggtgcggcttctggtgggcaagtggatgccgccaacctgatcaaaccgctgctgtcgagcggcaagatccgggtgattggctccaccacctatcaggagttcagtaatattttcgaaaaagaccgtgcgctggcgcgtcgcttccagaaaatagacattaccgagccgacgccggaagagaccattcagatcatcaacggtctgaaaaccaagtacgaagcgcaccatgacgtgcgttacaccgctaaagcggtacgtgctgcggtggagctgtcggtgaaatacatcaacgaccgtcatctgccggacaaggcgatcgatgtgatcgatgaggctggtgcgcgtagccggttgctgccggtgaacaagcgtaagaaaacggtcaacgtggcggatatcgaatccgtggttgcacgtattgcgcgtatcccggaaaaaaccgtctccgccagcgatcgcgacgtgctgagaagcctgagcgaccgcctgaaaatgctggtgtttggccaggatccggccattgaggcgctgaccgaagcgatcaagatgagccgtgccggtctgggccaggatcgcaagccggtgggttccttcctgttcgccgggccgaccggggtagggaaaaccgaggttaccgtgcagctggcgaaggcgctggatatcgaattgctgcggtttgatatgtccgaatatatggaacgtcataccgtcagccgtctgattggcgcgcctccgggctacgtcggttacgatcagggcggcctgctgaccgatgcggtgatcaaacatccgcacgcggtggtcctgctggatgaaatcgagaaagcgcacccggacgtgttcaacctgctgttgcaggtgatggacaacgggacgctgaccgataacaacggccgtaaagcagacttccgtaacgtgatcctggtgatgaccaccaacgccggggtacgtgaaaccgaacgcaaatcgattggcctgatcgaacaggacaacagcatcgacgcgatggacgagatcaagaaggtgtttacgccagaattccgtaaccgtctggacaacgtcatctggttcaaccatctgtctcctgcggtgatccagcaggtggtcgacaagtttatcgtcgaactgcaggcacagctggatgcgaagggcgtgtcgatggaagtgagcgacgaagctcgtgactggctgtctgtgaaaggctatgaccgtgcgatgggcgctcgtccaatggcgcgtgtgatgcaggaaagcctgaaaaaaccgctggccaacgaactgctgtttggttctctggttgacggcggctcggtgaaagtcgagctgaatgcagacaagaaacagctgacttaccacttcctcagcgcccagaagcgtaaagcggatgaaggtgctgtgcactaagcggtaggctagtaacgaaaaagcgatgccttggcatcgctttttttatacgtgaatttcacggactgctgtgagggcgccgtatgccgttaaaatggcgtagcggtcgaacggaatatgtcgcccttataaaatgagtgagccctctcagtttacctgcgccaatacaactcggtggagaacgttgctgcggcggtaaacggaaagggctcttttgagggatcacatcctcggtgtcgccaatggttggcgacgggtgagccgattaacggctacggaagacaatgcggcctttgctcaggtcgtacggggtcagctctacagtgactttgtcacccgtcaggatgcggatatagtttttgcgcattttaccggagatatgagcggtaaccacgtgcccgttttccaattcaacacggaacatggtgttcggcagcgtatcaagaacggtgccctgcatttcaatattgtcttctttggccatcgaatcctctaggtgtaactaccttagtttttaaccggcaagataatgccgaaaaacccacattatgtaaaggagtgtcggtgaacaatgcaccgattccacaaaattagtcagtttgggagggcagttcaaccagctgtgggggtatgacttgcgctgtccagcattccggcgctaacaccctgcgctgaaggttgctcaactgctgcaaaaattggcggcggggaatttctctcgctccaagccgggcagtgtgagcgttaagcacctgacagtcaaccaattctcctccataaccggcaaaatggcggcaaaacgcccataaagcacactttgatgcgttggtggtgcggctaaacattgattcaccgcagaacagcgctccctgggcgacaccgtacaggccgccgaccagctcttctccctgccacacctcaacggaatgggcgtgaccaaggcgatgcaattgtaaataggcttgctgcacctcctcgccgatccaggtgccttcatcggggcggtatgagcatgcggcgatcacggcggcaaaatcgtgattgagggtaatgcggaacggcgggttgcgcaggaatcgcttgaagctgcggctgacatggtattccgttgggaacagcaccgcccgtggatccggagaccaccagaggatggcctccccaggcgaataccaggggaagatcccgcgctcataggctgccagcaaccgcacaggtgtcaaatcgccaccgatggccagcagtccgttaggatcgtgcagggcggcctctggtgagggaaacgctacagactgcgatgacagcttaacaatgcgcataaaacctcttagcgtcgcctacaggcggttttacagcgatacattactgatacgttggcggaattgggcgtaacggccaggctggcgcatcagcgctgcgtggctaccttgttccacgatactgccgccatccatcacacagatgcgatcgaaatgctccagcccatagagtctgtgagtcaccagaattaacgtcttgccgcggcaatgctgacgcagcagggccaggatctgttgctcagtctcggcatccagcccttcggttggctcatccagcagtaatagcggggctcgatgcagcagggctcgggcaatgcccagacggcgttgctcaccaccggaaagctggcggccaccttcacccagccaggcattcagcccctcattttccagcagcttatccagaccgacttgttgcagtgcgaggtttaagtcctcatcgctggccgcaggtgcggcgatacgcaagttttcacgcagggtactgctgaagatatgtacccgttggctcactaccgtagtcatggcgcgcagcgtagcttcatcatagctagccaatggttggtcgttgagcaggatttggccgctgtcagcattccaggcgcgggtcagtaattgcaatagggtcgatttaccacagccggtacggcccaacagcgcgatgtgctcaccagcggcgatgttcagcgtcacgttgttcaacaccggcagcggttggtcgggataggtgaaggacacctcgctcagttgcagctctgcgcccggttgtgaggctggaccgctggcagggaaggtgacttccggttgctgatcgatgatctgcttgacccgggttgccgaagcgatcacctggcccagatgttggaacgcggcggcgacgggcatcatggcttcaaaagaggccagggcggcaaaggcaaacagggcaatcagagccccgggttgggtgtcgccaccgatccccgcagcggcaagccacatcaatagcgtgacggtgaggccacttgccaggatcatcagcgcctgagcaatcccccctagcgaagcctgttgccactgacggctttgccaacgctgttcggttgcactgagcttatttcggaaaccgtccagcgcgccaaacaccaccagttcggcctgcccctggagccaggcggtcaggtcggtgcggtactggctgcgtaacagggtcaactcttccccaataggcttgcctgcgcgatagaagaccggcggaacggccaacaacagcaataacaaaattccgcccagcgtcagggctagtggaacatccagccaactgaggccgaaggtgaccaccacaatcaccaccgcagcgctgaccatcggcgaaataacgcgtaggtagaggtgatcgagcgtatcgacgtcggcaaccaggcggttgagaagctcagcctgacggaagcgggcaataccacccggtgacagcggcaggatcttgcggaaggtaaatacccgcagatgggacaacacacggaaagtggcgtcatggctgacgacccgctctgcataacgcccggcggtacggaagatagccgcgccccgtacgccagcggccggtagcatgtagttgaaggtatacaaccccgccagcccggccagtgaagaggcggccaggaaccagccggacagcgccagcaggccgatactggccagcagggtgacgatggccagcacgatacccagtaaaatcagaaacgtgtggcggcgatacaacgccaggaatggcagcaaaacgcgcatgattatagctccccgctgcggtgtgcaatcagtttggcaaacagaccgggctgggcgctgagcgtggcgtagttgccctgctgcacgattttgccactgtccatcacccaaatctggtcataatcttcggtatcttccaactggtgcgtgaccaacagcgtggtctgctgatgggaggctgcattcagcgcctgcatcaccaaacgttcgctgtgggcgtccaggctggccgcaggttcatccagtaacagcaaacggcgggggctgagcagcgctcgcgctacggccacacgctgagcttgcccaacggaaaggcgggcagcaccgtcgcccagatcggtagccaacccttttggcaggtggggcaggaattcactgacgtaagcctgctcgacggcctgttgcaattgggcctcgctggcctgtgggtggccgagcaggatattgtcccgtaacgtttgagctggcagatgggggttttgccccacccagcccagttgctgacgccagttaaccgcagccagctcgcgcagttcgatgccattgatcagcaaggagccccgatagggcaggaagcccaataacagattcaacaacgaactcttcccggcaccgctaagcccgaccaaggcaatgcgctggttggcaggtaaggtaaaatcaagcggccccgcaagcactacgccattgggcgagaggatttccaactgctgtgcctgtacggccagtggttcttcgctatttagcattagggagccattgccaacctgctcgccctcggcggccaggaaggtttccagcgcttcggcggcgcccacggcctgggctttggcatggtaaaaggcacccagatcgcgcagcggttggaaaaactccggtgccaggatcagcaccagaaaaccggcaaacagcgttacaccagtgccgtagctgccaaagtccagttcaccgaggtaggagaagccaaaatagactgccaccacggcgatggaaatcgaggcgaagaactccagcacggcggaggagaggaaggccaggcgcagcacttccatggtgcgctggcggaaatcttccgaggatttggcaatgtgatcggtttccgcctggccgcgattaaacagacgcagggtatccaggccgcgcaggcgatcgaggaaattgccgctgagccgggccagcgcaataaagttacggcggttggcatctgccgcccccataccgaccagtgccataaacagtgggatcaacggggcagtagccagcaggataaacccggccgcccagttgatcgggaagacggtgatcaggatcagcaccgggataaacacggccagatacatttgcggcagatagcgggaatagtaatcctgcatatcctcaatttgctcaacgataatgctggcccagctcccggcgggcttgccctggatccaggcgggaccaagctgttgcagcttatccagcacctgcgcacgcatacgccggcgaatgacctgcccgcagataaagccgactcgttcacgcagccagctcaggaaggcgcgcaaagcaaaggtagcggccaaccagataaacgacgaaaccagttcgccacggggctgatgttcaataatcagcgcatggagcagtgaggccaacagccaggcctgggcgacgatcaaaatgccgcttgccagacctaacagcatggataaacgcagccaacgctgcgccaacgtactctgtgttttgagccaacgggttaactggtgctgtctggtttttttcatcaggtgtctgcgtcgccgatgcctgttgtagcaggcttggttaacgtactgttaaaaaagtgtttgtctctgcgggaaataagacaagtgaacgctaatgttacctcttcactcggtagacgtgaactaaatatccctttcataacttgggcaacagtcacgtttttagcgcggatggggttgttttgaactttcaggggtgggggatagaaataaggcggccaacaggccgcctcggtatcattgctgatgagggcttacttaacttcggcctgcgcgataccgtcgagatagcgttcggcatccagtgcggccatacagcccgttccggctgacgtgattgcctggcggtaaatgtgatccatgacgtcacctgcggcaaatacgcctgggatggaagtctgggtcgcgttaccgtgaatcccggactgcaccttgatatagccgttttccagctcaagctgcccgccaaagatcgcggtgttcgggctgtggccgatcgcgataaatacgccggcaagttctaactctttggtctgctcagcatctttggtgctgcgtaagcgcatcccggtgacgcccatctgatcgcccaacacttcgtccagcgtgcagtccgtatgcaggatgatgttgccgttcttcactttttccatcaggcgattgatcaggatcttttcgctgcggaaagtgtcgcggcggtgcaccaggtgaacttcagaggcgatgttcgacagatacagcgcttcttccacggcggtgttgccaccaccgaccacggcgaccttctggttgcgatagaagaaaccatcgcaggtggcacaggcggagacacctttgcccttgaacgcttcttctgatggcagacctaaataacgggccgatgcaccagtagcgataatcaaggcatcgcaagtatattcaccactatcacccaacaggcggaaaggacggttctgcagatcgacgctgttgatatggtcaaacacgatctgggtgtcgaacttttctgcgtgctcacgcatgcgctccatcagcgccgggccggtcaagccttcggcatcgcctggccagttctccacttcggtggtggtggtcaactgaccgccttgttccataccggtgatcaagaccgggttcaggttagcgcgcgccgcataaaccgctgcggtgtagccagctgggccagagcccaggatcaataatttgctatgtttagccgtgcccatgaataacctcgtttcccacaatggcggacaatggaaccgattgtagggaaaatgcggcagtaaaaaaagcgccaggggatgttgttaccgatttgtttgataaccagcgtctatcagccgatattttatccttgcgtaggcggggataacggcagcgataattttgtacagaatgggttaaaaatgcggtttttgttgggtttatgtgggtaactacccggttttgaatgggggaaattcctaacaaaaaatcaggcgctcacttttgcttgcggtacgttctactgattttgcttcttttgctttgacaatccgctgcgcatttgcgaaaacatcataggaagaagaaattaaccccgtgccagccgtaaaccgcaggcattttcgccacccaggcagaatattgccgaggcgcgatagatgagggagggtttgccctggcggtggttgatggatttctgaacgtaaatcatttgaattcgttgcccagaggtgacagacaggctgggtaacggcggaagatggtagtgacgaatagtgacgaagcacaagggcggttggtaggtattacgtatcttgttcccctcaggggaatgaaccgcttaacacaggcatcgggtcttcgcttggaacaaatccttgcacattgacgttggctagggtgtggcaagtgcagggaagaacataagagagacaataataatggtagatactaaaaaacgcccgggtaaagatctcgaccgtatcgatcgcaacatccttaatgagttgcaaaaggatgggcgtatttcgaacgtcgaactttcaaagcgcgtgggattatccccaaccccttgtttggagcgtgtgcgccgtcttgagcgtcaaggctttattcatgggtataccgcattgcttaacccgcattatctggatgcttccctgctggtcttcgtggaaatcacgctgaaccgcggcgcgccggatgtgtttgagcaattcaactctgcggtgcaaaaacttgaagaaattcaggagtgtcatctggtttccggtgatttcgactatctgttgaaaacccgtgtgccagatatgtcagcttaccgtaagctgttgggcgaaactctgttgcgtttaccgggggttaatgacacccgtacttacgtcgtgatggaagaagtcaaacagagtaaccgtctggttatcaaaacacggtaaggtgcaggtgcaaaacctgattaaattcgttacactcctgtttattcatacagttttggcgccggggaagcttctcggcgccgttactctatccgtcaacaggaacctggagtgcctttcttgagccaggaatacacagaagataaagaagttaccctgaaaaaactcagcagtgggcggcgtttgctcgaggctgtgttgatcgtggtggccatttttgccgtttacctcatggctgcgttggtcagttttaatccttccgatcctagttggtcgcaaactgcctggcatgagcctatccacaatttgggcggcggagtaggcgcatggttggccgacacgttgttcttcacctttggggtccttgcctatgcgatcccaccgattatgctggtgttgtgcctgtccggttaccgtcggcgcgacaagggcgaatacatcgatttctttgggctctcgttacgtttaatcggtacattggcgctggtgcttacctcgtgtggcctggcggcgttgaacgttgacgatctctattactttgcatccggcggggtgattggcagcctgctaagcaatgccatgttgccgtggtttaacggcattggcgccactttggcgctgctcggcatttgggcggtggggctgaccttgttcaccggttggtcatggctggtcattgcggaaaagattggtggtgtagtgcttggcgccgctacctttatgactaaccgttcacgccgtgaagaccgctatcacgacgatgacgacgtcgtgctcgatgagcgcgaggaaagtggccaacatgaggcacctgctcctatggcagtagatgaggacgatccgttgttctctgcctcttccgtgaccgaaaccgccgaagaagaagcgcaggatgctgccgatcctttattgagtggtttgcgcgccagcgatgatgatcttccgcttgccgagccagcaccggtcgttaccgatatcctggtaatgccgaaagcggccgttcaggctccggtcaccgtggccccggtagcgcctgcttccatcaatcagcacccattaacccctgcgcagccacaagacacgccgccgctgtattcgtttgaactgcctgaagagactccggcaccgagaacgacacgcgtagcggagccttatcgtgaggagcatgagccgcgcctgggtgactggcagacgcccgttacgccaaaaccagagccgtcaccgtttgatttctctgcggctcagcgggatagcgacgatgttatcggatcaacgggtttcagtgccagagaggtagtgaaaccagcggcaactgccgcagcagcagcgaccgctggcgcggtgaacaacaccttcatgcctgcgtttaccgccaccagcgatgcgagctcgcaggtcaaacagggcatcggcccggaactgccacggccaaatccggtgcgtattccaacccggcgtgagctggcctcctacggcatcaagctgccttcgcagcggatcgcggagcaagagcagcgtaaccgcggggacgaaccacatccagagccggtcagcaatccgcaggaagaagatgaagccttgcaagaggccgcattgcgtcaggcctttgccgaacagcaaagccagcgctatggcgacgagtatcagcaagaagaagagtatcagcaagatgacgaagatgcgcagcgtgaggccgaactcggtcaggcatttgccgcgcagcaacaggcacgctatggcgtagaagcacctcagcctgaaccagaaccggctccggtgactcgtccggtggatacccgccaggcctacagtttctcaccgatggcagatctggtggatgacggcccaaccgagccgctgtttaccctgtcgccacagcttgaggatagcatcgagctggaaagcgagttggaagacgatgtgccgttcgggcagtttgagcctgaggtgcccgcttatcaggcaccgcgtccgcaaactaaccctgcgcctagttaccagccgcaacagacgtatcagccacccgttcagcagcaaccgccagcgccagcgatggacagcctgatccatccattcctgatgcgtaatgatatgccgctgcagaaaccgactacgccactgccaacgctggatctgttgaccgaggccccgaaagaggtcgaaccggttgatacctttgcgctggaacagaaagcgcggctggtggaagccagcctggcggattaccgcgtcaaggccgatgtggtcgacattctgcctggcccggtcatcacccgcttcgaactggatttggctcctggcgtcaaggctgcgcgcatttccaacctgtcgcgcgatctggctcgttcattgtcaacttccgccgtgcgtgtggtggaagtgatccctggtaaaccttacgttggtctggaattgccgaacgtcaaacgacaaaccgtgtatctgcgagaagtgctggattgcccagccttccgcgacaatccatcgcctttggcgatcgtattgggtaaagatatcgcgggtcagccggtggtcgccgatttggctaaaatgccgcatctgctggtagccggtaccacgggttctggtaagtcggtcggggtcaacgccatgatcctcagcatcttgtataaggccacgccgaaagaagtgcgctttatcatgatcgacccgaaaatgctggaactgtcggtctacgaaggcattccacacctgctgaccgatgtggttaccgatatgaaagacgccgccaatgccttgcgttggtgcgtagccgagatggagcgccgctataagttgatgtctgccttgggggttcgtaacctggcgggctacaacgagcgggtcgatcaggccgaggcgatggggcggccaatcccggatccgttctggaagccaagcgacagcatggatatcacgccgccggtgttggaaaaagagccgtacatcgtggtgatggtggatgaatttgccgatctgatcatgacggtgggcaaaaaggtggaagaactgatcgcccgtctggcacaaaaagcgcgtgctgcggggatccacctggtgctggcaacccagcgtccttcggtggacgtgatcaccggtttgatcaaggccaacatcccgacgcgtatcgcctttaccgtatcgagcaagatcgactcccgcaccattctcgatcagggcggagcggaatccttgttggggatgggtgacatgctgtatttggcaccgaactcttcgataccggtgcgtgtgcacggggcgtttgtccgcgatcaggaagttcatgccgtggttaaagactggaaagcgcgtgagcggccgcagtataaagagggcattctcagcgccggtgaagacggtgaggggggcgcaggcggtggtctggacggtgacgaagagctggatccgctgttcgatcaggcggttgagtttgtggtggataaacgccgcgcctcgatttccggtgtacagcgtcagttccgcatcggctacaaccgcgccgcgcgtatcatcgaacagatggaagcgcagggcattgtcagcgagcaggggcataacggtaaccgtgaggtgctggctccgccacggcatgactgattgccatcaggcgctgtaaccataataaaagggccgctttgcggcccttgtgcaaagaagcgtaaacccctgctttatcggaatagtgctctggctgtcagtcaagcgcttcgggtagagtggaggtgttcagggttatattgacccagtttgcggtaaacgcatttcataaggtatctggaataatgaaaaaactgttgatggcctgttgtctgctttcgggattcgcgtctacttccgtgttagcggatgctgcgcaagatttgcaaagtcgcctggcgaaagtaaacagtttccatgccagcttctcccaatcggtcaccagtagtgacggcgctgcggtgcagcaaggggaaggcgaattatgggtaaaacgccccaatctgtttaactggcacatgacctcgccggatgagagcgtgctggtttcggacggtgagaccctgtggttctacaacccgttcgtcgagcaggtgacggccacctggctgaaaaacgccaccggcaatacgccctttatgctgatcacccgtaacgatgctaacgactggaaaaagtacaacgtgaagcagaaaggcgatgatttcgaactgacgccaaaggccagcagcggtaatctgaagcagtttgccatcaccgtgaccaatagcggcaccatcaaaagctttgcagcggttgagcaagatggtcaacgcagcgcttatcagttgaagagccagcagagcagcagcgttgatgctgccaaattcaaatttaccccaccgaagggggtgacgctggacgaccagcgccagtgaggtctacgtgagcaacatgtcactcgatttttcccacaatgagttccagccactggccgcgcgtatgcggccaactacgctggcgcaatacattggccagcagcatttgctggccccgggcaagccgttgccacgcgccatcgaggctgggcagttgcactcgatgatcctgtgggggccgccgggaaccgggaaaacgacgctggcagagttgattggccgttatggccgggccgatgttgagcgcatctcagcggtgacctccggcatcaaggagattcgtgaagccatcgagcgcgcccggcaaaaccgggacgcaggccgccgtaccatcctgtttgtagatgaagttcaccgcttcaataaaagccagcaggatgccttcctgccacatatcgaagacggcaccattacctttatcggtgctactacggaaaacccttcctttgaactgaactcggcgttgctgtcccgtgcgcgggtgtatctgctcaaagcgctgacggcggatgacatcggccaggtgctggatcaggccatggaagacaaggcgcgtggttttggcgatcagaatatcgagctgccgccggaaaccaagcgcatgctgtctgaactggtgggtggcgatgcccgccgcgccttgaacagcctggagatgatggccgatatggcggaaatcgacggcaaaggcatgcgggtattaaccccggagctgctcaaagaggtctctggtgaacgcagcgcgcgcttcgataacaaaggcgatcgctattacgatctgatttctgcactgcataaatccgtgcgtggttcggcaccggatgccgccttgtactggtatgcgcgtattattaccgccggtggcgatccgctgtatgtggcgcgccgcctgctggccattgcctctgaagacgttggcaacgccgatccgcgcggaatgcaggtggccattgccgcctgggattgcttcacccgcgttggccctgcagagggggaacgcgctatcgcacaggcgatcgtttatctggcctgtgcacccaaaagcaacgccgtgtataccgcttttaaagccgccatgcgtgatgccaaagagatggcggactatgacgtgccggagcatctgcgtaacgcaccgaccaagctgatgaaagaaatggggctgggcgcagaataccgctatgcccatgacgaacccaacgcctacgcggccggagagagctatttcccggcggaaatggccaccacgcgctactatcatccaacctcgcgcgggctggaaggtaaaatcggtgaaaagttggcatggctggctgagcaggatcaaaatagccagacaaaacgctaccgctagcgttgccgttgcggtaaggttagcgggtatcacacttcttttatgcggctataccgttgcggcataaaacacaatttctctttcaataacaacaagcacaggattagcatgctcgatcccaatctgctgcgtaatgagctagacgcagtcgccgtaaaactggctcgcagaggctttaaactcgatctggatctgctgcgttcgcaagaagagcgccgtaaggttctgcaggtagaaactgaaacactgcaggcagaacgtaactcccgatcgaaatccatcggcgcggccaaagcgcgcggtgaagatatcgagccactgcgtcgcgaagtgaacgaactgggtgacaagctggatgctgccaaggccgcactggataagctgcagaacgagatccgtgattacgcgctagtgatgccgaacgtgccggacgacgcggtgccggatggcaaagacgatagcgaaaacctggaaatctgccgctggggcgaaccgcgtcagtacgatttcccggtacgcgatcacgttgagctgggcgaaatggccggtgggctggactttgccgctgcggtgaaactgaccggtgcgcgttttgtggtgatgaaaggccaaatggctcgtatgcaccgtgcgttggcccagttcatgttggacctgcacacggaacagcacggctatatggaaacctacgtgccgtatctggtgaaccatgccacgctgtacggtactggtcagttgccgaagtttggtgaagatctgttccataccaaaccgctggaagaagaatcggaaagcagcaactatgcgctgatcccaactgcggaagtgccagttaccaacctggtgcgtgacgagatcctcgatgaagaagatctgccgctgaagatgaccgcgcatacgccatgcttccgttcagaagccggttcttacgggcgtgacacccgtggcctgatccgtatgcaccagttcgacaaggtcgaaatggtccagatcgtgcgcccggaagactcgatgaatgcgctggaagagttgaccggccatgcggagaaagtgctgcaactgctgaacctgccatatcgtaaagtgctgctgtgcaccggtgatatcggttttggttcctgcaaaacctacgatctggaagtgtggctgcctgcgcagaacacctaccgtgagatctcttcctgttctaacatgggggatttccaggcacgtcgtatgcaggctcgttgccgcagtaaaaccgagaaaaaaccacgcctggtgcatacgctgaatggctctggtttggccgtaggccgtactctggttgccgtgctggaaaactatcagcaggccgatggccgtattcaggtgccagaagcattgcgtccttacatgggcggcctggaatatatcggttaatccacctcacggtggtagcgaaatagtgtatcgaaagcgcctacgggcgcttttttcgtttgaatggttttaatttacgaatgaaagccacatttattgatagcagacaaagtttactaccccctaatgagtaatatccttacttatggagggggaatcgtttttccacatcaaaccacccagcgctaattcagcttcctcctgtctctgccaaccaaggcatgacgtttcccgttgttcgggcaagaccaggagtgagctatgtcgaagcaaaaatctgcagcatcatcatccaacggtatcagccgccgtacgctaatgaaatccggcacggtagcgggcttgaccctggccgctggcggtttttcgttgccttttagccgccatgcagtggcagaaactgtcgatactgcggtgcaacccccaccgcaggataaagtggtgtggggagcctgctcggttaactgtggcagccgctgcgccttgcggttacacgtacgcgatgacgaagtttactgggtggaaaccgacaacaccggcgacgatgtttatggcaaccatcaggtgcgcgcctgtttgcgtggccgctcaatgcgtcggcgcatgaaccatccggaacgtctgaattacccgatgaaacgcgtcggaaaacgtggtgaaggtaaattcaaacgcatcagttgggaagaggcttacagcgaaatcgcctccagcctgcagcgtatcgtcgccaaatacggcaatgaagcggtttacatcaactatacctctggcattgtcggcggcaatatcacccgttcttcgccttatgcctcgctggttgctcgcctgatgaactgctacggcggttttctcagccactatggcacctacagtaccgcccagatcgcctgcgccatgccttatacctacggcagcaatgagggtaacagcacctctgatattgaaaacagcaagctggtagtgctgttcggtaacaatccggcggaaacccgcatgagcggcggtggcatcacctatttcctggagcaggcacgggaacgttctaacgcgcgcatgatcgtcatcgatccgcgctatacggatacggccgctgggcgggaagatgagtggatcccgatccggccaggcactgatgccgcattggtcgccggattggcgcatgtgttgatcagcgaggatttggtcgatcaaccgttcctggataactactgcgtgggttacgatgagaaaaccctacccgccggtgcacctgccaacggccactacaaggcctatatcctgggccagggtgaggacggcgttgagaagaccccacagtgggcatcgcaggtcaccggcattccggccgagcgtatcatcaagctggcacgtgagattggcagtgccaaaccggcctatatctcgcaaggttgggggccacagcgccaggcaaatggtgagctcacctcacgggccattgccatgctgccgatcctgaccggcaacgtggggatcaacggcggcaacagcggcgcgcgtgaatcaacctacaccatcaccattgaacggatgccggtgctggaaaatccggtaaaaacgcagatttcctgcttcagctggaccgatgccatcgcccgtggcccggaaatgaccgccaaacgtgatggggtacgcggcaaagacaagttggacgtgccgatcaagttcatctggaactatgccgggaacaccatcaccaaccagcactccgatatcaacaaaacccacgacattcttcaggatgactcccagtgtgaaatgatcgtggtgctggaaaactttatgacctcctcggcgaaatacgccgacattctgctgccggacctgatgacggtcgagcaggaggacattatcccgaacgactacgctggcaatatgggttacctgatctttatccagccagccacctctgccaagtttgagcgtaaacctatttatgaagtgatgagtgaggtagcgcgccgtcttgggcctgaggtacaccaaaaattcaccgaagggcgcactcaggagcaatggctgcaatacctttacgccaagatgctggagaaggacccgcagttgccgtcgtatgaggccttgcgcagcatggggatttacaagcgtaaagacccgaacgggcactttgtggcctataaaaaattccgtgacgatcccgcagccaacccgttgaagacgccttcaggcaagatcgagatctattcggccaagttggcagagatcgccagcagttgggagttggagaaggacgaaaccatcagtccactgccggtttatgcctcaacctttgaaggttgggatgacccgttgcgtaacacctacccactgcaaatgttcggtttccactataaggcccggacccactccagctacggcaatatcgatgtgttgcaggcggcttgcccgcaggaagtctggatcaacccacttgatgccagccagcgcggcattgccagcggtgaaatggtgcgggtattcaatggccgtggcgaagttcgcgtggccgccaaagtcacaccgcgcatcatgccgggcgtggtagcgatggggcaaggagcctggcatcaggccaacatgaacggtgaccgtatcgatcacggtgcctgcatgaatacgctcaccacccaccggccatcaccgttggcgaaaggtaacccacagcatactaatttgatccagatagaaaaactatgaaatgaaaatcattatcaataaagcctggtatatcaacactttattgattgtgagcaaagtgtaactacctcttttggagcatagtgccatttaaggcaggccacaattaaaacacttttacctgcttttttgaaatctacctgtattgggagcggcgtaacacgttgattgcaggttttattgccagttttactggttattttatgcaacccagagcgaaaccattatgaatgaatccgaaaaaaaacctctgtccggccttcagtgctccaggcgaaagctggtcaaaaatagtgccattggcgggcttgcccttgccgtcggtggcgtttccctgcctttcagccgtcgtgccaacgctgaaacctctccgacatccgcccttgccaaacccgaagaaaaagtggtgtggagtgcttgtacggtaaactgcggtagtcgttgcccgctgcggatgcatgtggtcgacggtatgatcaagtatgtcgaaacggataatactggcaacgacgagtaccaagagttgcatcaggttcgtgcctgcctgcgtgggcgctcaatgcgccgccgcgtgtataacccggaccgtctgaaataccccatgctgcgcgtgggcaaacggggtgaaggaaaattcaagcagataagctgggatgaagcctacacgctgatcgccgacaacatgaagcgcatcatcaaagattatggtaatgaagccatctatttgaactacggtaccggcaccttggggggtactgtcacccgttcctggccaccgggttctacgttgatcgctcgcctgatgaactgctgcggcggctatctgaaccactatggtgactacagcaccgcgcagatcgccatggggctgaattatacctacggcggttgggctgacggtaacagcccgacggacatcgaaaacagcaagctggtggtgctgttcggcaacaacccaggcgaaacccgcatgagtggcggtggggtaacctacttgctggagcaggcgcgtgagcgttcgaatgcgcgcatgattgtgatcgatccgcgctacaccgataccgctgccggtcgggaagacgagtggatcccaattcgccctggcaccgatgcggcactggttgccgggttggcgcatgtgttaatcagcgagaatttggtcgatcagccgtttctggataaatactgcgtgggttacgacgaaaaaaccttacctgcgggggctccagctaatgggcactataaggcctatattctgggccaaggtgacgacggcattgagaagacgccggcctgggcctcaaaaattaccggtatcccggccgaccgcattgtcaaactggcgcgcgaaattggcagtaccaaaccggcgttcatttcccaaggttgggggccgcaacgccatgccaacggtgagttgacctcacgcgccatcgccatgttgccgatcctcaccggtaacgttgggatccatggcggtaacacgggtgcacgcgaaggctcctacggcctgccgtttgttcggatgccgacgttggagaatccggtaaaaaccagtatctccatgttcatgtggaccgatgccattctgcgtgggccggaaatgaccgccaagcgtgacggcgtgcagggcaaggacaagctggacgtgccgatcaagtttatctggaactatgccagtaactgcctgattaatcagcactcagaaatcaaccgtacccatgacattctgcaagacgagaagaagtgcgagatgatcgtggtgatcgataaccacatgacctcgtcggcgaaatatgccgatctggtgctgccagattgcaccgcctctgagcagatggatttctgtctggatgcctcaagcggcaatatgggttacgtcatcttcgccgatcaggcgatcaagccgcagtttgaatgtaagaacatttatgaaatgaccagcgagatcgcccgacgtatgggggttgagcaggccttcaccgaggggcggactcaggaagagtggctgcgtcacctttatcagcaatcccgcgaagccattccggcgctaccggagtttgaacagttcctcaagcaagggatcttcaagcagcgcgatcccgatggtcaccatgtggcttacaaagcattccgggccgatccgcaggctaatccactgcaaacgccttcaggcaaaatcgagatctattctgcccaactggcggagctggcagcgacttgggaattatccaaggacgacgttatcgatccgctgccggtctatgcggccggtttcgaaagcctcgacgatccgttaagcagcaagtatccattgcagatgaccggtttccactataaggccagaactcactccacctacggcaacgtcgacgtgctgaaggccgcttgccgccaggagatgtggatcaacccgattgatgcgcaatcccgcggcatagccaacggggacctgatccgtatttacaacgatcggggtgaggtacgcattaatgccaaggtgacgccacgcatgttgccgggcgtggtcgctatgggcgaaggagcctggtatgcgccagatggtagccgtatcgatcatgctggcagtatcaacgtgctgaccacccagcgcccgtcgccgttggccaagggcaatccttctcacaccaatctggtccaggtcgccaaactttaaggagtagctgatgactacgcaatatggattctacattgattcgagtcgttgcaccggctgcaaaacctgcgagctggcctgcaaagactataaaaacctgaccccggacgtcagcttccgccgcatctatgagtatgccgggggtgactggcagcaggacggcgatagctggcaccaaaacgtgtttgcctattacctgtcgatcgcctgtaaccactgtgaagacccggcctgtaccaaagtgtgcccaagtggcgccatgcacaagcgagaagacggttttgtggtggtgaacgaagaggtgtgcatcggttgccgctactgccatatggcatgcccgtacggcgcaccgcagtacaacgaagcgaaagggcacatgaccaagtgcgatggctgctatgagcgcgttgccgttggccaaaagccgatttgtgtcgagtcctgcccgctgcgtgccctggactttggcccgatcgacgaactgcgtaaacaacatggcaccctggcgcaagtggcaccgttaccggccgcgcatttcaccaaaccgtgcatcgtactgaaacctaacgccaacagccgcccgagtggtgacactaccggccatctggctaatccgaaggaggtttaaaatgggaacgggatggcatgaatggccgctgatggtgttcaccgtattaggacagtttgtggtgggcggcgttatcgtaatggggctggcgttgatcgccggtaatctgaccgatcgccagagtaaggcggtacacggttctatgtttttcctatggttgctgatggggatcgcctttatcgcctccgtgatgcacctggggacgccgatcagggcctttaactcgctcaatcgcatcggtgagtcggcgttgagtaatgaaatcgccagcggttcggtattctttgcggttggcggcctctattggctgctggccatgttgaaaaaaatgccgcaggcgctgggtaaagcctggctagtagtcaccatggtgctgggtctgctgtttgtctacgccatgacgcgtgtctaccagatcgataccgtaccgacttggcataacggttacaccacgctgaacttcttcctgtcggtgtttatcggcgggccgctgttgggcgtgttgctgctgcgggcggctggtctgcaagtggctggccgtggtcaactgatgatgatcagcgtgctggcgctgttgcttagcctgtgctcggcactgttgcaaggcagtgagttggctactatcagcagctcggtacagcaggcgtcggcgctgatcccggaatatggccaactgatggtatggcggctggtcttgctggttctcggcctgggttgctggatttgcccgcagttgcgccgtggtaacgccagtgtgatggggttgaccttgggctttgtgttagtctttgccggtgagttgattggccgtggcgtgttctacggcctgcatatgaccgttggcatggccgtggctggctaacgttaatctgggcgcggcctggctgcgcccctggagaagccccaagttatgatgcttgaaaaaattgccctgactggccgtgtgctaggtgttttattgtatgccccaccggagagcaaagagtgccagcctttactggattctttggccgacccgcagtggttgaccgaatggccttatgaaggtgcacaagaggccgcagccctgattgccgaaggtttggctggaaaccagtcagagacgctgtcagaggcttatcaacgcttgttcgttggcccacatacgctggttgctccgccttggggttcagtctatctggatagagaaagcgtgctgtttggtgattcgacgctgcgtctgcgccaatggctgcgggtgaacggtatcgaagcccagcgcgaccagaatgagccggaagaccatattggcactttgctgatgatggcggcctggttggccgaagagaagcaacacaaaatgatttccgggctgattgcgctgcacattctgccttgggcaccgcgttatctggaactgttgcagcaacatgctggacatccgttctaccagggcgtggcgcagttggcacaaattacgctggcagcctgggcggaagagtgcccgacaccagtgccgagcctggagctgtatttctgatgaacaacgaccagcagttatctgcgcaaggcaatagccgccgccggttgctgactggttggcttgatcgtaataaagccttgccggagcaggatgcaccctctgtgacattgtctgcggtggctcgtccacctcaggctttgccggaggcattgttcagctcgttatgcaacggttgtggcggctgcgtgagcagctgcccgtacggtttattgagcctcgatcaaagcaagccggtattgagcatcgatttcaccgagtgtgatgtttgccgcaaatgcaccaccgcctgccaaaccggggcgttgcgggacaaaatgccctgcgacacgctgctgcgcccgcaaatcagccatagctgcctggggcggcaagacagctgccggatgtgtaccatcaactgcccgcaacaggctttatccttccagctttctgaaaatggtacccgccaattgcagtgcgacgatgcgctgtgtaatggctgcggactgtgcaagctatcctgctttcatgggcatattaccctggccgcctcgggtgaaaaatcgttgccggaacagctataaagccacttttaacccgttgttaaacatattgtgcgatcgcccgttaaccgccgattgacttttttatcgccagtggcatgatgcgcgcactctactctgtctgttcggtttcaatttctctatgtccgcatattctcgcccagtgcttatgttgctctgcggcctattgctgcttacggtttccatcgccgttttgaacactttggttcccctctggttaacgcatgctcaattgccaacctggcaagtgggggtggtcagttcgtcttattttaccggtaacctgttgggtacgctggtggcgggcaaactgatcaagcggattggctttacccgcagctatcatcttgcctgtttggtctttgccttcgctaccatgggtatggtgctgtcgctggacttctggagttggatcggctggcgcttctttgccggggtagggtgtgcctggatttgggtgatcgttgaaagcgcactgttgcgcagcggcaatctgagtaaccgtggtcaactgctggcggcgtatatgatagtttactatctcggtacggttgcggggcagttgctgctaagcagtgtttcaacccaactgctggatgtggtgccgtgggtgaccgccgttgtgatggccgccatgctgccgatgctgtttgcgcgggtcaatcaccaggatgacgaaccgcagcaggcctctatctggcagatgtttaaacgtcgtgacgcccggttgggcatcaacggctgtattatctcggggattgtgctgggctcactgtacggcctgatgccgctgtatttaaaccatcaggggatgagtgatgccaacgtgggttactggatggcgctgctggtcagttccggcatcgtgggtcagtggccgatagggcgcctggccgatcgctacggtcgcctgttggtactacgcattcaggtgtttgtggtgatccttgccagcattgcgatgctgggtaactatgcgatggccccggcgctgtttatcctgggctgtgctggctttaccttataccctgtggcgatgtcctgggcctgcgaaaaggtgctgccgcatcagttggtggcgatgaaccagacattgttgatgagctataccgtcggcagcttgctcggcccatcgatgacgtcgatgctgatgcagagctactccgatcggctgctgtttgtgatgattgcggtagtggcactggtttatctggtgatgctgctgaaaaagcccgaccatcaccacaccccgttggccgcggcctgaaataaaaaacccggcagatgcgccgggttttttgttcgagcagggagaggcttaatagatcactttatggccgtagctttccaggatccccttcacgcgatccatggtgtcggccttcggcggatggacgccgtccagcttgtattcttcacccatcgcgatccatttgtgcttgcctagctcgtggtaaggcaacagctcgatcttctcgatattggtcatatccttggtgaactcaccgagcagatgcgtcgatttatcatcatcagaccagcccggcaccaccacgtagcggatccaggtgcgttgattacgtttggccagataacgggcaaactccagcgtgcgatggttggaaactcccaccaggttctggtgaatatcgtcattcatctgtttcaggtctagcatcaccaggtcggtggtatccagcagctcatcgatcaccgggtcgtaacggcggacaaaaccgttggtgtccagacaggtgctgatcccttctttgtgacaggcgcggaaccagtcgcgaacaaattcggcctgcaggatcgcttcgccgccggacgccgttacgccaccgccggaagcgttcatgaagtgacggtaggccacggtatcggtcatcagctcttcaaccgtgacctctttgccgccgtgggtgtcccaggtatcgcggttatggcagtacaggcagcgcatcaggcaaccctggaagaacacgataaagcggatacctgggccatcaacggtgccacaggattcgaaagagtggatgcggcctttcaaggacattgcgggtttctccaaaatcgactgtcaaacgcagtctaaaataggctggtaaccgccaggcagggatcaacgatgtggcgaaaaaaggcgccaggtaaaacgattcctgttggccggttacgtaccggatcactgttttgccagatatccatgcagtatatacccatcgcaggctaagcagcagcgtagatacctggcaaaacagactcaagaccagagtcagggggtagttagtaaaaaggccggaatatccggccttggtaagatttgttctgcggggcagagcgatcccgccccggagaaaccgcgattagatcgactgggtgaaagtacgagtaatcacgtcttgttgctgttctttggtcaacgagttgaagcgcacagcgtaacccgatacgcggatggtcagctgaggatatttctcagggttttccatcgcgtccagcagcatttcacggttcatcacgttcacgttcaggtgctgaccgccttcgatggacgcttcgtggtggaagtaaccatccatcagacccgccaggttggctttacgcacgtcgtcatctttacccaacgcgttaggcacgatggagaaggtgtaagagataccatctttcgcataggcaaacggcagtttggctacggaggtcagagaggctacagcacctttctgatcgcggccgtgcattgggttggcacctggaccaaatggagcgcctgcacgacgaccatctggggtgttaccggttttcttaccataaaccacgttagaggtgatggtcagcacggactgagttggtaccgcattacggtaggtacgcagtttctgaattttcttcatgaaacgttctaccaggtcacatgcgatgtcatctacgcgagaatcgttgttaccgaactgcggatattcaccttcgattttgaagtcgacagccaggccgtcttcgtcacggatggtggatactttggcgtacttgatagcagacagggagtcggctgctacggacagacccgcgataccacaagccatggtgcgataaacatcacggtcatgcagagccatcagcgcagcttcatagctgtacttgtcgtgcatgtagtgaatgatgttcaacgaggtcacatactgcttggccagccagtccatgaagtggtccatacgctccatgactttgtcatagtccagcacggtgtccatcattggggcttctttcgggccaacctgcattttcagtttttcatcaacgccgccgttgattgcgtacaacatggttttcgccaggttggcacgcgcaccgaagaactgcatttgcttaccgacaatcatcgggctgacgcaacaggcgatggcatagtcatcgttgttgaagtctgggcgcatcaggtcgtcgttttcatactgtacggaggaggtgtcgatagacactttcgcggcgtattttttgaagttcaacggcagtttttcagaccacaggatggtcatgtttggctctggagatggccccatggtgtacagcgtgttcaggaagcggaagctgtttttggttaccagcgtacgaccatcaacacccataccagccagagattctgttgcccagattgggtcgccagagaacagctcatcatactcaggagtacgcaggaagcgaaccatacgcagtttcatgaccaggtggtcgatcagttcttgcgcttgcagttcggtcagtttaccggccttgatatcgcgctcaatgaacacgtccaggaaggtagatacgcggccgaaggacatggctgcaccgttctgggatttcaccgcggccaggtagccgaagtaggtccactgtacggcttcttgagcggtgctggctgggccagaaatgtcgtagccgtatttggcggccatttctttaatctgagccagggcacggtgctgttcagcaatttcttcgcgcagctggatggtcatttccagatcttcgccattttccagacgggtctgcagagacttgaactggttcagcttgtcggccatcaggaagtcgataccgtacaaagcaacgcgacggtagtcaccgatgatacggccacggccatacgcatctggcagaccggtcagcacgccagacttacggcagttcaggatgtctttggtgtaaacatcgaatacgccctggttgtgggttttgcggtattcggtgaacactttcttcacttgtggatccagttcacggccataaaccttgcatgaaccttcaaccatcttgatgccgccgaatgggatcagcgcgcgtttcagaggagcatcggtctgcaaaccaacgatggtttccagatctttgttgatatagcccgcatcatgagaagtcacggtggagacgacgttggtatcgaaatcaactggcgcatgggtgcggttttccagtttgatcccttccataaccttgtcccacagagtggtagtggcttgacttgcgccagccaggaaggattcatcaccctcgtaaggagtgtagtttttctggatgaagtcacgtacgttgacttctttctgccagtcaccttcgctgaaaccttgccaagcggtcgctaacttctcgttaagttcggtcattatacacctaccttctaatgtggatttctttgtaaacccggcgccgtgccagccaacagattagtgattctgtttgccgccacgcagataaattacccagtaagtcaacccaaccagaagaccaccgccaatgatgttaccgatggtgacggggatcaggttgtcgatgataaagttgcttacggtcagatgagcgaattgctcgggtgctgcccccacggcttgccaaaactctggcgtggcaaagtgcttaaccactatccccatagggatcataaacatgttggcgatactgtgctcaaagccgctggcgacgaacatggctaccggcaggatcatggcgaacatcttgtccatcaggctgcggccggagtagctcatccagacggccaggcaaaccatcaggttagccaggatacccagacagacggcttctataaaggtgtggtgcagtttatggtcggcggtttgcaatacgttcaaaccccacaggccattggctgccatatactcgcctgagaaccagatcagcgcaacgaagaacagggcaccaatcaggttgccaatatagacgtttaaccagttaagagccagttgcccccaggtaatacgcccgctggctttggcaatcacggtcagtacggtggaggtaaacaggtccgccccgcagacgacgaccagcattaaccccatggagaaacagataccacccaccagcttggcgaggccgaaaggaatggcggcggtgccggtggtcgctgtgatataaaaaacaaaggcgatagaaatgaacacacctgcggtgatcgctaaataaaaagtcgtcagcggatgcttggtggctttataaacccccgcatcctcggcaactttcgccatcgcggcaggtaacagcatatcgaaggggttgtcagctctcacactaactctcgctcttaagggttattacaacacactgagatactagcaaagcagtatagggtaaaaattgacttggatcataacgcgcggaagtaaaacggcttaaaaccgcaaaattagtagggtttattgaattatattattgatttttatataaaaaatattttttaatgtttacaaaaaattttgaagttaacgccattttggggtggggatagttaaatttttgtacttattgtcgctttttgatgaataagcattaattgatggttaattaatatttcacgctgacgtaacaattggcgatttaattatcctgttggctgataagtgcgcttttgataaaaacattcaacgccaaggtttgcctgttttttgatcggcaaccgaatcaaggctgcttctttgggagtaacgccggtaaggttctaccggcgtatcaatcaggcttaagcctgcgcccagtgacggcgtttggccgtttgcagcttttcgtaagccgccaacagcgcttgatgggccggcagggctttcaattcactgtcgatggcaaacaggccgttgaagcgctcttcgccgctcatggccgcagaggccgcgtcaaccgcatcctgaccatacatcttcacgaaggccgtgtgatattgggctgggtcgcgttctggctccaacgccaacagcagcagtgtctgcaggcaacgatagtagttgctgcgctccggggtaaacagcgaggcgttgaactcctgcgtccactcggcccagatcagtgcctgctcgagatcgccaccggccaatgccagcatggatttcagttcgccaacgcgcagggtgtaccaggcgttgtctttaccagaggcaatgcccagcaattcacgtacgcgggtgaaatcgtccaacccttcatcatccaactgctggatcagagccaggtattcttctggctcccattcgctgcccggcagttgcagcagggtttcacgcaggtgcgcgcccatgctgttgtttgccagtagcaggtcctctgccggatagatgtcggacatccccggtacgatgatgcggcaggcgtacacgtccaggtgctcgtaatcggcgatgtacacttcggcatcttctttattaaagatgctcatcagggtggcgaactcttcctgcgtgctgccgctgaaactccagtcgacaaacggatagtcggcatcctgtttgaacatatcccaggagatcagaccgctggaatcgatgaagtgagtttccaggttggcgtgctcggccacttcttcgtcgtcgaaggttggggcggtaaacacatccagatctttcaagccgcggccttgcagcagttcggtaacggtacgctccagcgcgaccccgaaatcggggtgagcgccaaaggaagcaaagcaggtgccgttggcggggttgaacaacaccacgcagatcaccggatagttgccacctaacgaggcatcataagagaggatcgggaagccttcggcctccagcttggcgatcgcctcaaccacgtcaggatagcggttcagcacttcgctcgggatttccggcaggctgatggactcggcgatgatgcggtttttcacataacgctcgaacacctcggagagaccctgaacccgcgcttcgttggcggtattgccagcggacatgccgttggacacatacaggttgccgatgatgttcattggaatataaacggtctgctgatccgattggcgggggaatgggagggcgcagatgccacgatcgctattgccagactgcagatcgatcagatcgctggcagtcaattcctgctctggatcgtagaaggcgtgggtacgctcatccaggataccttgtggcaacgagttgtcagccgggatcgggaaccatttctcattgggatagtgaacgaaatcgccttcggcaatctgttgacccaaatagaaatcggcgaagaaatagttggtcgacaggcgctcgaaatattcgcccagcgcggacgccagcgcggccttcttgctggcacccttaccgttggtgaagcacagcgggcaatcgcgatcgcggatatgcactgaccagacgtgtggcaccggattcagccaggaggcttcttcgatattgaaacccagatcggttaatttctgctgaaaacgggcgatggagtcttccagcgcagcgtctttgccaggaataaaagtttgcgtcattgtcttcacttatgtggcgtactaaaaacgcgcaatgatacggggttttgttcccaagctccacgtattcctaaagccgatcagatgtcacagtaattatgtggataaagacgataattcagcgggttatcaataacggagaaacgtaatgaaatcagtgaaactcagcgtgttggcactactgttggccggggtttgcggctcggcactggcgttacctaatatcaccttgctggccaccggcggtactatcgctggcggtggcgactcggccaccaagtccaactacaccgcaggtaaactgggcgtagaggcattggtggatgcagtgccagagttgaaaaaggttgccaacgtccagggcgagcaggtggtcaacatcggttcccaggatatgaatgacgaagtctggctcaagctggtcaagaagattaatgcggactgcgccaaaaccgatggcttcgtgatcactcacggtaccgacacgctggaggagactgcctatttcctggatctcaccgtcaagtgcgataagccggtagtgattgtaggggcgatgcgcccggcaacggccatgagtgccgatggcccatttaacttgtataacgccgttgtcacagccgctgaccctcaatcggccaagcgtggcgtgctggtggtgatgaatgatacggtgcttgatggccgcgacgtaaccaaaaccaataccaccggcgtacagactttccagtcgcctaactttggcccgctggggtatatccataacggcaaaatcgactaccaacgttcgccacagcgcaagcacaccagcgaaacgccgtttaacgtcgaccagatgagtacgctgccgacggtcggtattatctataactacgccaacgcatcggatgcgcccgccaaggcgctgatcgccgaaggttatcaagggattgtcagcgccggggtgggtaacggcaacctgtataaaaccgtgtttgatacgttggccacggcggcccataacggcgtagcggtagtgcgttcttcccgcgtgcctaccggctccaccaccgaagatgcggaagtggatgatactaaactcggttttgtggcagccggaacgctgaatccacaaaaagcgagaattttgctgcagctggcattaactcaaaccaaagacgccaaacagatccaggcgatgtttaatcagtattgatccctgactcaagtgggggcgtaatgcccccattttccccgccctgactatgctgtaggaaatctcttttcgcaggaacgatttcatgcaggtatttgatagccaaagaatggcatttgacgagacgatggtgatgtacgttttttcacctggttgatgaatggttcgcggccctggcccatagccgtgttagctgaatacagcacaaaaaaccgcgttaacccgctgaataccccagtgtcacagcgttttatggcataaataaactctgaggccgcagagcctgttatttgcggtctcgccagtttcccacccttggaacaataagcattgcagccgggttacgtgagtgataaaaccgatagagttggttaacatcagcgttaacttcgggcatatgtcgaaagccggtttttacggcgcacagtgaatgtggtgaggggaaatgactcaggtttataattttagctcaggcccggcgatgctgccggttgaagtgttgcgtcgtgcggaacaagaactgtgcaactggcacggtcttggcacttcggtgatggaaatcagccatcgcagtaaagaattcatcgccgtcgccgaacagtccgaacaggatctgcgcgatctgctgaaagtccccgccaactataaagtgctgttctgccacggtggtgcccgcgcgcaattcgccgcgctgccactgaacctgttgggtgataacaccactgccgactatatcgatggcggttactgggcgcacagcgcaatcaccgaagcggaaaaatactgccagccgaaggtgatcgacgttaaaaccaccgttgacggcttaagcggcatcaagccgatgaaagagtggcaactgagcgataacgcggcttacgtgcactattgcccgaacgaaaccatcgacggtgtggctatcgatgaaacgccagactttggcgataaagtggtgattggcgattactcttcgaccatcctttcccgcccgttggacgttagccgtttcggcgttatctatgcgggcgcacagaaaaatattggcccggctggcctgacgctggtgatcgtgcgtgatgatctgctgggtaaagcacgccgtgaagtcccgtcgatcctggattacaccgtgttggcagaaaatgactcgatgttcaatacgccgccaaccttcgcctggtatctgtctggcctggtcttcaaatggctgaaagagcagggcggcctggtggaaatgcaaaagcgcaaccaggccaaggccgagttgctgtatagcactatcgatcagtcggacttctatcgtagccgcgtggccattgccaaccgctcctggatgaacgtgccgttccaactggccgatcctgcgctggataaagtgttcctgagtgaagcagaagccattggcctgcaggcactgaaggggcaccgcgtagtaggcggcatgcgtgcttccatctataatgcgatgccgctggccggcgtgaagaccctgaccgactttatggtcgactttgaacgccgccatggttgattgccaccgcccgcattgaacgggcggtcgtaccgctgttgtccttttgcattaaagcggctccggcattatcccggggccgtttcgtttatcagattctggagagttttgttcacatggtggattccctgacgttacaaccggttgctttggtcgatggcaccgtcaacttacccggctccaagagcgtatccaatcgggctttgctactggctgcgctggcgcggggaacgacccggctgaccaacctgctggacagcgacgacgtgcgtcatatgctgaatgccttgcaagcgctgggggtgagttaccaactctccgacgatcgcaccacctgttccgttgagggcaacgcaggcccgttggttgccacgcagccgttggagctgttcctcggtaatgccggtacggcaatgcgtccattagcggcggcgctgtgcctgggagagggcgacgtggtgttgaccggcgaaccgcgtatgaaagagcgcccgattggccatctggtggatgccttacgccagggcggagcgcaaattgattatcttgaacaaaccgattatccacctgtgcgcctgcgtggcggtttccgtggcggcgacgtcagcgttgacggcagcgtatccagccagttcctgaccgccttgctgatgatggcaccgttggcggcccaagacaccgctatccatattttgggtgagctggtttccaagccttatatcgatattactctgcacctgatgagcactttcggcgttgaagtcacgcacgacaactatcgcgtgttccatatccgtgggcagcagacttaccgttcgccaggcgactatctggtggagggcgatgcctcttcggcatcctatttcctggccgctgcggcgattaagggcggcaccgtgcgtgttaccggtatcggtaagaaaagcgtgcagggcgataccaaatttgccgacgtgctggaaaaaatgggcgcgcgcatcacctggggcgatgactttatcgagtgtagccgcggcgagctcaaaggcatcgatatggacatgaaccacattccagatgcggcgatgaccattgccaccaccgcgctgttcgcgaccgggccgaccaccatccgcaatatctacaactggcgggtaaaagaaaccgaccgtctggcggcgatggcaacagaactgcgtaaagttggcgccgaggttgatgaaggtgaggattatattcacgtcgtgccgccaagcaagctgcagtttgccgagattggtacctacaacgatcaccgcatggcgatgtgcttctcgctggtggcgctctccgatacaccggtgaccattctggatccgaagtgtaccgccaagaccttcccagactattttgagcagttggcgcgtatcagccggttggcctaatattctccatatccgttatcgatgggcctcgtttgaggccttttttacgcattggtggccatcttttcggcaatcagacagttcgcggtaacagtaaactccacaggcgcgtataatacgcccccgaatctgctcctacttgggcagagagcaggcgtgttcctgtgaggtttctacctgaaggagagagaaatgacggctacagttccggtgataaccgttgatggaccaagtggtgcgggcaaaggcacgttgtgcaaggcgctggcagaatcccttggttggcgtttgctggattccggcgcgatttatcgcgtactggccctggcagcgttgcaccatcaggtggatatcacctctgaagaggcgttagtccccttggccgcccatctcgacgtccgctttgttgctcaggacggcaagctgcaggttattttggaaggtgaggacgtcagtaatgagatccgcaccgaaaccgttggcaatacggcttcgcaaacggccgcattcccacgggttcgtgaggcgctgctgcgccgccaacgcgcatttcgcgaggccccgggcctgatcgccgatggccgtgacatgggtacggtagtgttcccggatgcgccggttaaaattttccttgacgccagttcagaagagcgtgcgcatcgtcgcatgctacagttgcaggaaaagggctttaatgttaactttgaacgtcttttagccgagataaaggaacgggatgaccgtgaccgtaatcgggctattgcgccactggtaccggctctcgatgccctcgtgttggattctaccagcatgtcgatcgaggaagtgatccagcgggcgttggcatatgcacatgaagttttggcgttgccgcagcaataagcgcggcggcgtttttagctttttgttatatttgtcatcgtactgcatagcagtaactgaatatatcgggtaaaattttacccctgtaacctaaaccttgtcggcaggaagccaatggcaaggtatgtgaaacaaccccattcggcgggacgctaaatggacgttaaactatagaaccctgaagattaaacatgactgaatctttcgctcaactctttgaagaatccctgaaaacaatcgaaacccgtccgggttccatcgttcgtggtgttgttgttgctatcgataaagatgtcgtactggttgacgccggtctgaaatctgaatctgccatcccggctgagcaattcaaaaacgcccagggcgagctggaaatccaggttggtgacgaagttgacgttgcgctggacgctgttgaagatggcttcggtgaaactctgctgtcccgtgagaaagctaagcgtcacgaagcttggatcacgctggaaaaagcttacgaagaagctgaaactgtcgtcggtgttatcaacggcaaagttaagggtggcttcactgtagagctgaacggtattcgtgcgttcctgccaggttccctggttgacgtgcgtccagttcgcgacactctgcacctggaaggcaaagagcttgagtttaaagtcatcaagctggatcagaagcgcaacaacgttgttgtttctcgtcgtgcagtaatcgaatctgaaaacagcgcagagcgcgatcaactgctggaaaacctgcaggaaggcatggaagttaaaggtatcgttaagaacctcactgactacggtgcattcgtggatctgggcggcgttgacggcctgctgcacatcactgacatggcttggaaacgcgttaagcacccaagcgaaattgtcaacgtgggcgacgaaatcactgtcaaggtgctgaagttcgaccgcgagcgtactcgtgtatctctgggcctgaagcaactgggcgaagatccatgggttgctatcgctaaacgttacccagaaggcaccaagctgactggccgtgttaccaacctgactgattacggctgcttcgtggaaatcgaagaaggcgttgaaggtctggtacacgtttctgaaatggattggaccaacaaaaacatccatccgtccaaagttgttaacgtgggcgatgtagtggaagtgatggttctggacatcgatgaagagcgtcgtcgtatctccctgggcctgaagcagtgcaaaaacaacccatggcagcagttcgcagaaacccacaacaagggcgaccgcgttgaaggtaaaatcaagtctatcactgacttcggtatcttcatcggcctggacggcggcatcgacggcctggttcacctgtctgacatctcctggaacgttgcaggcgaagaagcagttcgtgaatacaagaaaggcgacgaaatcgcagcggtggttctgcaagttgacgcagagcgcgagcgtatctccctgggcgtgaagcaactggctgaagatccgttcaataactacctgtctatgaacaagaaaggtactattgttactggtaaagtcactgcagttgacgccaaaggtgctacagttgaattagcaggcggcgtagaaggttacctgcgtgcttctgaagcctctcgcgaccgtattgaagacgcaactctggttctgaacgttggtgacgaagttgaagctaaattcactggcgttgaccgtaagaaccgcgttgtaagcctgtccgtccgtgcgaaggacgaagctgacgagaaagatgcaattgctacggttaacaacaccaagccggaagaaagcaacttctctaacgctatggctgaagccttcaaagcggctaaaggcgagtaatgacggggggcggtttctgaccgccccgatacggtagtttagctgcaaagcttggaggaactatgaccaagtctgaacttattgaaagacttgctggccagcaatctcatattccggcgaaggccgttgaggatgcagtgaaagagatgctcgaacacatggcagctacgctagccgagggtgagcgcatcgagatccgcggattcggcagtttttctcttcactaccgtgctccgcgcgtcggccgtaaccctaaaacgggtgataaagttgagttggacggcaagtacgttcctcacttcaagccaggtaaagagttacgtgaccgtgccaatatctatggctagtcgctgaccacccatagtgttgttgcttgtaaagaatataaaacggtgccttagggtgccgttttttttcgcctgtaaaaccttccataccggcaaaaatttgcgctccgttacgcagcttttcctgcaaatgcccaatagccaaccgattgtttacgacctcctttcctgagtagcaacctgcaactggtggttatccgtctgagaagtcacatttgttgcaggataaacttggcaaggagcgcggaaatcaggatctcactggatagggccgccatcgctttggtgatggggatgctgccaatactgtttttgcaccacttaccgtcgtggcctttattgatggggctagccgtcgcggctttgtggctatggcgatataaaccgaatccatggagtcagacactgtgctgctgcctgctgggttttatctacgccaccggcagtgccagcctgttgatgcagcaagtcgcaacgttgacgaccagcggcgataaaaccgtgattgcttccgtgcgtagcatttggctgaacggggctgaaacgccacaggtgcaactgcgtatcgagcaggtgagtgggcactggctggtgcctgcgttgtcctttacggcaaactggcgcggcgaaaagccctgtgcagggcaacgttgggcgatgaaggttcgctttcgcccggtacacagcagcttgaatgaagggggctttgacgggcagcgttgggccattgctaatcggcaaccgctacgtggctttatacgtaccgcaacggcactggataagggctgcaactggcgccagcagattgtcaaacggatggatcaatcgctggtgccgctgacgcaacggccggtgttgctggcgctggcgtttggcgaacggacgctgatgagtaatgagctgcgtgggcaactgatgaaaaccggtgtggcccacctgatggcgatttctggcctgcatatctcgctggccgccgcctttgcctgggggctggcgcgtggcgtgctgtttttattgcctgcgcgatatatcggctaccgtttgccgctgatcgtcagttggttgatggcgctgtgctatgtgtggctggcaggtgggcaacctccggcaatgagggcctttattgccttgtctctgtggctctggttgcgcctcaaaggcgtttcctgcacttcctggcaaatctggctgtggtgtatcagcctgctgttgctgtgcgatcctatgtcggtgctttcggacagcttctggctctctgccctggcggttgcggccttaatcttttggtttgaatgggcgccgttgcccaggcgcttcagcacttcttggggctgggcacctctgcgttggctacacatgcaactagggatgacgctgttgctgatgccgttacaatttggcctgtttcatggcttgagctggacatcgttacccgccaacctttgggctgtaccgatcgtttctctgctgtcggttccgttgatattgttggcattgatgctgttttttattccgccggtaagccactggtgttggcaattggccgatcttaccgtcagttgggccttatggccgctacctgggctcgagcaagggtggctacaggttggggctgccttgctgcaattcagcgttcttggctggttagccgtggtttgctggcggtttcgctggtggtatcactttcctgttggttgtgccgttgtggtgttaggttgcctgttctggcgggaaagaacaccggattatcgctggcgggtcgatatgatcgacgtggggcacggcctggcggtagtgatcgagcgggaaggcaaggccgtcatctttgatacgggcaaccgctggcaagcctccagcgcggcagagcgtaatattttgccattcctgcgctggcggcagatttcgctggagcaaatcattatcagccatagccatctggatcatatcggcgggttaccgatactagcagcggcgtttccacaggccagcgtgcgtacgccgatcgttaacgtaggccacctgccttgcgtacaagggcaacggtgggtatggcgagagctaaactttcaggtgttgtggccaccagcacgggtggattatgccgctaacgatgactcctgcgtagtgcgtgtcgatgatggcaagttcagcctgttgctgacgggtgatattgaacgccgggccgaacaggcgctgctgaaacaacgtgcgaatttacctagtactatccttcaggtgcctcatcacggcagcaagacatcttcaacgccgccatttttgcgtgccgttgcccccgagctggcgtttgcctcggcatcccgctataacgcgtggcggttaccggcagcaaaaatagtcaaacgctatcgggaaaatcacattccctggcgtgatacggcccgttcagggcagctcagcgtgtttttttatcgtcatgattggcaagttaaaggctttcgcgaacaactaaatccacgttggtatcatcagcggtttggcgttgagggggataatgagtagaatgggccgctatttcttccgatgctggtatttgcatgatgaatgataaagatctctccacctggcagacgttccgtcgcctctggccgatgatcacaccttttaaaaccggtttggtagtcgctgccgtggcgctggttttaaacgccgccggggacacgttaatgctgtccctgctcaaaccgttattagacgactttggtaaagccgatagccgagtgttgcattggatgccgctggtcgtgattggcctgatgctgatgcgtggcatcaccagctatgtctccagctattgtatttcctgggtgtctggcatggtggtgatgcagatgcgccgtcgtctgttcggtcatatgatgcgaatgccggtggccttttttgaccagcaatcaacaggaactctgctttcacgtattacctacgactcggaacaggtagcgtcatcctcctccagcgcgttggttaccgtggtgcgtgaaggggcctcgatcatcggcctgttcatcatgatgttttattacagctggcagctctcgctgatcctgatcgtgctggcaccgatcgtctccttcgcgatccgcctggtctccaaacgtttccgcaatatcagtaaaaacatgcaaaacaccatggggcaggtgacgaccagtgcagaacagatgctgaaagggcataaagaagtgctgatctttggtggtcaacaggtggaaaccgagcgcttcaacaccgtcagtaaccgcatgcgtcagcaggggatgaagctggtttcggcttcttctattgccgatcccattattcagttgatcgcctcattggcattggcgtttgtgctgtttgcagcaagcttccctagcgtgatggatacgctgacagccggtaccattaccgtggtgttctcctccatgattgccttgatgcgtccactgaaatccttgaccaacgtgaatgcccagttccagcgcgggatggcggcctgccagacgttgttctcgatcctggatctggaacaggaaaaggataccggtactcgtcaggttgagcgcgccaaaggcgatatcgaattccgtcatgtgacctttgcctatccggggcgtgagatcccggcgctgcgtgatatcaatctgagcatttcagaaggtaaaacggtggcgttggttggccgttcgggttcgggtaaatcgacgattgccaacctgttgacgcgtttctacgacgtgcaggaagggcagatcctgatggatggtcacgatctgcgggaatataccctggcttcgctgcgcgatcaggttgctctggtctcacagaacgtccatctgttcaacgacaccattgccaacaacattgcctatgctcgtgaagagcgctacagccgtgaagagattgagaaagcggcgcgtatggcctatgccaccgacttcattgataaaatggagcatggtctggatacggtgattggtgagaacggcgtgatgctttccggtggtcagcgtcagcgtattgccatcgctcgtgccttgttgcgagattgcccaatcctgatcctggatgaagccacctccgcgctggataccgaatccgagcgtgcgatccaggcggccttggacgaactgcagaaaaaccgtacctcattggtgattgcccaccgtctgtcgactatcgagaaagccgatgagatcctggtggttgaagatgggcgtatcgttgagcgtggccagcatgccgagttgatcgagcagaaaggggcttacgcacaacttcaccgcatgcagtttggtcagtaatgatagagcgcatctggtccggtagttcactggtttacctgctgctgttaccgctctcctggctgtatggcctggtgagcggcctgatccgccttagctaccgctgcggcttgcgcaagagttggcgtgcgccagtgccggtggttatcgtggggaacctcactgcgggtggcaacggtaaaacaccgatggtgatctggttggttgaacagctgcaacagcgtggctaccgggtcggcgtggtttccagaggttacggcggcaagtcggcggtctatccgctggtgctggatgctcagactaccacccggcaggccggtgatgaacccgtgctgatctatcagcgaaccggggcgccggtggctatttcgccaaaacgtgccgaagcggtgcaagccttgttgaatcagggcgagcttgatttgatcatcaccgacgatggcctacagcactatgctttacagcgtgattttgagctggtggtgatcgatggcgttcgtcgcttcggcaatggttggtggttacccgctggcccgatgcgtgagcgtgtgtctcgcttaaagacggtggatgcctgtgtggcaaatggcggtgttgcccaaccgggggaaatcgccatgaagctccaggcgcaggatgcggtgaatatcgccagcggtgaacgccgcccggcgatcgaattacctcacgtagtggcgatggcagggataggtcatcccccaaggtttttcgccacgctagaaaagttgggggttgaggtcgagcgcgaggtggcctttgccgatcatcaggaatacaaccacgggcagttagccgcattggcgagccaaggccaaacgctgctgatgaccgagaaggatgcggtgaaatgccgttcctttgcccagcctgactggtggtatctgccggttgaagcggtacttcccaccgagcaggccgagcaactgttgcaagggatccagaagttaatcaaataatctaagcttccaaagcgtgcaagcccaaggcttgcgcgcaagcttgcagtgagcgctgctgcgtttgctgataaagcgccaattcatcaatcacgcctgcccctaatgcctgttcaaacgccgtacggctcgatgacgccgcgtattgcgcatggtggctcccccccagattagactgaaaaattccagcggcgctgaccggcaggaaatcctcatacaccaacggctggaagcggatgtagtccagtgcgatgagctgttcgagcgtgctgtgctgctcaacggtctctttagctgccagcccgcattcggtagggaaatagcggaaccaggctaattgctgcacacgtagtgcattgtaatcatccgggaaggcctggaaatgttcagccagcagttggtaatagcgtggagcattatcttccgtagccggaacctgtaatgcatcctgcgcggcctgcagcaggcgatcgtaaagcgcacgccctttggcggttagggcgactccccgttgctcaatctcaccgaaacgcgcggtatgattccccacaacctgatgaccgtcaggttcgataaacaggacttgttcctctaacgctttgaaactggtctggcgtaacagaatagggcagtggcgcgtaggcgggccttcgatcaccgctttgggtgggatcccgcgttctggcattgccgcctgtacccgatcgatatccagcgttcttggcgtcagatggttgatatgtggccctttgaaggcaacgatatcggcgatcaggcgatgttgattgtgcaactgttgatattcactggcgctgacggtggccaaacggtgccaacggaaggtttcgagcgcctgggcaacaaattcttgcgcctgttcggcatccagaccgccctggatttcatgtaacgctatcagctccaaagcccgctcggtaaaaatgcagcggcgatccagcagtcgttgtgccagctcgcgcagcgccacattctcaatcagttccagtcgtagcaacgaagtaaatatgcgaaacgggctgacttgcagatcggcttcatgtacggcccgaaaggcggtggagtggacggggactccggcagcggtcagatcgtaataacccaccggagacatgcccatcacggcaaacaaccggcgtaaggtttgcaattcagctgccgtgccgacgcggatagcgccgtggcgctccatcgataatcgaccgatttcaccggtaatctgtaacccatgggccagggctgaatctttactcagcacctcccggttggtttcagcgaccagttcgatcaagtcaccgtacagtggcacctcttgttgatacatggccgacattgccagggaaaatttggcgcgaatgtcattcggcgagacgaagtgctggtcgatcatactgctagctccttagctcaataaaatctgaaaaatgcggcttaggccgccaatagtgctggctagatgacccctcaccgtgtttttgactcaagtctagacagttggttcatgatttgttatcgattggctaacgatattagtgttttatgcgttggctctcatttgcaggtataactccaagtggtgagtgatgagctaaaggctccctcgatgagtttaaaataagctaaattttaactattaaaatcagtgtgataggaatattctgggcgggtgtagctaaaaagtgtgataaacctcttgtcttgatgatgagtttatgagtaaatgcataccggcctgtgatgcagcgctatttatgtacgagtatagattaagtagttcctcccaagacgttatcatctgattccgcttcaaagacgaaccttctaagtacctcccataagtaatgattctgaaaaacggccaaattgccatagggcaggtttttgtaaatatttaaaaggtaatagtaatgtctaagaagactggtcaggttaagtggttcaacgaaagtaaaggttttggtttcattgaacaacaagatggcggcaaagatgtattcgtacacttctctgcaatcatgaccgaaggtttcaagactctggcagaaggccagcgtgttgagtataccattcaggacagcccgcgcgggccggctgccgccaacgttgttgctctgtaagtttacagggaatagcgtatagagagcttaatacaaccataatgacgcgtttatgctgagttatgcggaagatattaagctcaacaagcccgccgcagtgcgggttttttaatttttgctcacgagaggtttgttacgaaaaactttaggatgggctggtagcgtccacacaataacaaaaataacgttgtgaaggatgctcaagtgaaaggatataaaatatgtttaagaatacaatgctaaaaatgggccaggtaaaatggtttgatcaggctcaaggctatggtgttatttcaccggtcgatggtagtgacgaaatttatgttagccgccgtgctatcgccaataccaaaaacaagtcattaaacgaaggtcagaacgtcgagttctcgatttatcgtagctctcacgggctgtcagcggcagacgttatcgcgttctgacccaaactttcctcgccagtgccggtgccgccaccccatgcactggcgaagaaaatttccccaggatcctctatcatcaggccattgctcaatgacccttggatatcaggatgccaatccccgttatttcgctttcctctgcccgcgcgcttcatcttgccgctcaagggctgctatccccaattcaacgccaggcttgccccgatgatgtggtgaccgccatcgatcgtatgggcttgctgcaaattgacaccattagcgtggtggcccgcagcccttacctggtgctgttcagtcgcctgggcgattatcggccagaatggctggaacaggcgttggctagtcgcaaactgtttgagtactgggcgcacgaagcctgttttctccccatcgatgactttggtctgttacgccaccgtatgttgcaaccgcagggaatggggtggaaatactcgcaggaatgggtgcaacagcaccaacaggctatcgatgaactgctacagcatatcgcggtgcaggggccggtgcgttcggccgattttagcgccgaaaagaaaggcgctaacggctggggggattggaagccggaaaagcgtcatctggaaattctgtttacctctggcaagttgatggtggctgaacgccgtaattttcaccgtgtctacgatctcaccgaacgtttattgccgcagtgggatgatgatgtgcatgctttacccgaggcgatggcgcaacaacagatgctcacccgcagttgccgctatctcggcgcgtttaaagccgaatggctggcggattattaccgattgaaacgcgtctcccccaaaccgttgttggcaacgctattacagcagggagagatctcccagatcgctatcgacgggctggaaggagaattttatgtccatcagtcgctggcggccgagttggcgctggcagaacaagggaagttgaagtctacggtgacctgtctgttgtctccttttgatccggtggtgtgggatcggcggcgcgcgctggaactgttcaactttgactatcggctggaatgctacacgccaaaagaaaaacgccagtacggctattttaccttgccgctgttgcagcggggcgaactgattggccgggtggatgcgaaaatgcaccgtaaacagggcgtgtttgaagtaatcagtttccatcttgaatccggggtcaagctgggcaagcagcgttgtcaggatattcgtcaggcaatcacccgtacggcgaaatggcacggggcgcagcaggtctcgctaggagatgtacccgcatcgctggcagcagagtgggggcaaggctggggagttccctcaccccaacccttatgtct

SEQ ID NO: 310 - DNA, 56249 bp, unknown
  Altogen  635822 strain
  misc_feature (78)..(200): n is a, c, g, or t
ttgacggagatcctgacgttacccaaaaacgttcaacctcgcccttttcaatcatcagtcatccccttaacacatcgnnnnnnnnnnnnnnnnnnnnnnnnnnnnnnnnnnnnnnnnnnnnnnnnnnnnnnnnnnnnnnnnnnnnnnnnnnnnnnnnnnnnnnnnnnnnnnnnnnnnnnnnnnnnnnnnnnnnnnnnnnncgaaatgatgtatcaattattgcattatcaacgagcataaatagcgtgttgccaaaacgcactaagccagcgggggaagtgaagttgaattcaggttataagagcgggtgcggaagccgcgtaaaatgcggcttccgcatcggagcacgatgtatacctctggaagccgtgattaaccgatctggttaactcagcaacaaatgccgcattgcgtagcgcctcacccagttcttttttttactggaacgtaggcagaagaaagactgcgtcagcggctgagccagcgaatttaagtatttgtgtaagcgtcagatggataatgccatcgaaaacaagtgatctttatcctcattgtttctggtagtctgccgttaactggttccaaagttcataacctccaataaccgcagtagtgcagagatatccccgagtgtcagatatatcgaacgattttgcttaattcattttgttgcgtataaatgtttcagtcgcatccgttatttcttgataagaattatttttcacccatatacagcaatcttttacggctactccctgaatatatcacccacataaccgctctgatctcacgctgccagcggaaatgggcagaatacgacagagcctgtttgccgacacctgtagccagctacttgtagcgacctgacatcgaaaatcgtccgacctacaatcgacggtggttttcaacccacattaggtgaatctcaccgagtctgaaacccagattaaatggcaataaacccgtccaggaaaacatccgcccccccattcgagctgctgcttctgctaatttgcagtaagcaaggatagaagcacagcgatgaacctggcttattagatcaaagtcctggccttgaggccaagactttgatctaataaggtcagtgcaaaaaacggacagactgccatgctcaaagaaccctctcccccagcaataccagttttaaaccattacccttgatgaattgttctcgaagaccacaggtcaatgtcgcttaccgctggttcctgtggatggggctgaccaagaaggtccccgatgcctctactctgagccagaaccgtatccgtcgcttcaacaacagcgatgtcttccagcagatttttgaccatgtcgtgtaacaggctctgtgtcagggcatggctaacggacgtgtgctttacaccgacagtacccacctgaaagtcgatgccaacctgcgtaaggccgtgaatacttcacacagttgaatgatgccaaggaaacgatagaaagaagcttcgcggacgcgaaacaacatcatggacatcgatatacgcggtaccgtggtctgtcgaaagtgaagatgttgtgtctgtttgccgcgactgtgtagaatatgaagaagatggcgctgctggcacttctttatcagctttatgcgtggttgaaatcggctctggaagcagagaggaacccgataggcgagaagaagcggtaaatgatggaattatggaaaaatattgctatcgcgaactacggtcgataaaaagaagaaccccacccgaaaaagtggggttagtcatcaatctgaaggcatccattatcggatgcctttttcgtggtaactggcctgcaagttactcgtcttcttttattacttctattacttcagccgctagcgctggggtattggtttcttccggcatgctgacgctttcgatggtcagtttgatttccggggtgatcagatcgctcaacatggtgtaaacctccatggtgtgctcgcggatcgcatcgccaatatcattgataaagccttcttcacgcagcgtcgccaccagggtggagaacaccgccttatcgaagaactccggtgcgttgatgccgtggagcaccgacaaacgctgggccataatgcggctctctttctccagggcaccccggttgatacttgggttggcgctgaggatcgacatggtgatggcatagcgttgcagggtttcacgaaccccggcggccagcagctgtaacggacggatgcgcgcaggattcagcaccagttcatcgcctttgctacaaatcagttgctgacgtatcagctcttcgatcagcggttgcagcacttcggctagctgttctttgtcgtagcgcaggaacagctctgccttcagcatcggatagatcaggctgacctgacgcaacagctcaacgcgcgacacgcggcggtgatgcatcacgatagaggcgatcagcgaaggcagtaccagcatatgatggatattgttgcgatagtacgtcatcagcaccgcctgctcgcgcggtagaatgatgatgtcgccgatgttgtccttctccacttcaaacttgttcatgtttaaagcgtgatccagcaactggtctggcgtttgtgttggtacggtggcgtccggtgcatacggcacgttacgcattaactgtaagtagcattccaactgctcaagcaactgctcacgggtcagcgaacgttggcgtgaggccagcagcgcggtggaacacaggttcatggcgttggcggcggcagcgttgttgatacgcaccatgatctgagcggccagatcgttgaccgcaggcgtcagccagcttgggcgctgtgcttcgatcgggtcgatagactcacgccaatgcgggacgttgtggttcaggtacgtagtcaacggcagcggttcgccaaagttcacgtaaccctggccgaggttgcgtagcttgcgcaagccgcgcaccatttgcagcaggctctctttctctttggtcgcaccacgcagctctttggcgtaagtacctacttccatcacgtgctcgtaaccgatataaatcggcaccagggtgatcggacgagtgccgccgcgcagcatagcctgaatggtcatcgacagggtgccggttttcggttccagcaggcggccggtacgggagcgcccgccttcaacaaagtattctaccgagtaaccacgggtgaacagctcaccgaggtattcacgaaatacggttgaatagagtttgttgcccttgaaggtgcggcggataaagaacgcgcccagacggcggaatatcggcccggcaggccagaagttcaggttaatacccgctgcgatatgcggtggcaccagcccttgatggtagagcacgtaggacagcagcagatagtccatatggctgcgatgacacggcacatagacgatctcgtggccatcctgcgccaactgacgcacacgttcggcgttggtgacgttgatgccctgatacaggcggttccaggtccagctcaacacgcggtcggacaggcgcaccgtttcatacgagaaatcggcagcaatctcttccattagcgcaatcgcgttctgctgggccttttcgtgggagatctttttgctgcgcgcttcgtcttcgatcgctttttcaatcgccttggaggccagcagcttgttgaacagatcctggcgggcaggcaggcttggcccaacggcagccaggcgctggcgtgcgaagtgcatgcgtgcgacacgggcaagtttttgcgcgatggttttatcggtgccgtgctcggttgccatccggcgtagtgacacggtgttggagaaacggacaaagctgtcgcgccccagccacagtacggcgaagaacttctgtacaccgttcagcaggcgcaggtgcggcgtgccgtggccttcgcgccctggggagcggccaaacatcaccgataccggcaacatctgaatatcgagatccgggttgctgcggtgcagatccagataatcgtggaacagttttaccgattcttctttgggggtgtaatagcggaatacgcgtgggccatcgtggataaacacgtagcttggcagcacggtgccatcgatttccaacgggttaaggggatcgggcagatcttgcgccagacactgggtgcgcaaggtgagtaaatccgccttggaattataaggtaaaacatacaaaatcggtcgtgagggatccagccctaactccgtgaccggatctgaagggataaccttacttcttaccaacatttttagtggtaagttcaatatcttataatagattttacgccaacctgacatgacaacgtgaagcctcttgttagcaattcgccgcaagcataccagaaaccgggtagcagatctgtggcgttgggaaatccacggccgttcacggcaatggaagtacatagttgaattatacctgatggatatcaaattgaccgctctagcgcattcatgctctcgcggcattggtatgacatagctaggtgattaaggtattccaaccttgctgtatactgcgctgcgataaaaatgtgattgggctggcaaatctgtctggaacgttgcggctggcgacatgcgggtacatgattcatcttggagaaaggcgttcttaactatggcaaatcaagcaactggcctgacgcgtatcattaaagcagcaggctattcctataaaggtttaaccgccgcctggcagaacgaagccgccttccgccaggaactggtggcgacggtagtggctatcatcgtggcggtttggctggacgtaggggcgatcgcgcgcatcttgttgatcggctcggtgctgctggtgatgattgtcgaaatcctcaacagcgcgattgaggccgttgtcgatcgcgtgggtacggaatatcacgagctttccgggcgggccaaagatatgggctcggcggcggtatcgctggcaatcattctggcactgttcgtttgggcttcggtactttggcagcatttggcgtgaaaacctgcgggtatcgttgcgatcccgctcgctacctgctgatttttatttattcttcggttcccaatccagacttagctgtatatactcacagcaagactgtataaacaaacagggggcggaatgaaagcactaactaccagacagcaagaggtctacgacctgattcgcgatcatatttcgcaaacgggcatgccaccgacgcgtgccgagatcgcaatgcgcctggggttccgctcaccaaatgctgcagaagagcacttgaaggcgctggctcgcaaaggcgttatcgagatcatctccggcgcatcacgcggtatccgcttgctgatggaagatgaagaggggttacccctggtgggccgtgtggctgcaggtgaacctctgttagctcagcagcacattgaagggcactataaagtggatccttctctgttcaagccaaatgccgatttcctgctgcgcgttagcggcatgtcgatgcgagatatcggcatcctggatggcgatctgcttgcagtgcataagactcaagacgtacgcaacggccaggttgtcgtcgcccgtattgaagacgaggtcacggtcaagcgcctgaagaaacacggtaacgtcgtcgaactgctgccagaaaacagtgaattccaaccgattgtggtcgatctgcgccagcagaacttcaccatcgaaggcctggcggtgggtgtgatccgcaacggcgactggatctaaccgctttacctcgtattacagccctttaaaacggcaaacctcgccccaactctggggcgatacatgagacactaagcgggcgctgcatgcggcgcccctactgtcaaacatgttcgatccctgcaaattcagctacattgccactttatcttcagctttaaatctatgcttttacgggaacatatcgccatgcgcctgctttctgccttcaccagtgacaccgacaaagctctgtggcgtctggcgttgccgatgatcttctccaatattaccgtccccttacttggcctggtggataccgccgttatcggccatctcgatagccctagctaccttggcggggtcgcggtggggtcaatggccactagcttcctgtttatgttgttgctgttcctgcgaatgagcactaccgggctgacggcgcaggcgctgggggcacaagatccctaccggttggctcgcgcctttatgcagccgttattgttggcgctggtggccgggttggcgattgtgctgttgcgagccccgttgatcaccttggcgctgaacattgtggggggcgatcgggaagtattggtacaggccaggctatttttggagatccgctggctgagcgccccggcggcgttggccaatatggtgctgctcggctggttgctgggagttcagtacgtgcgggcgccggtgatcttgctgatcgtcggtaacctgctgaacatcgtgctggatatctggctagtgatggggctgggttggaacgtgcagggggccgcggctgccacggtgattgctgaatacgccacgctgttgcttggcttgtggttatcatggcgggtactacgcatgcgggggatttcgctggcgatgctgcgtaccgcctggcgtggggatctgcgccgcctgctggcacttaaccgcgacattatgctgcgctcgttattactgcaactgtgtttcgcctcgttgaccattctgggagcccgcatgggcggagaagtggtggcggtgaatgcggtgttgatgaatctgctgacctttaccgcctacgcgctggatggttttgcctacgcggtggaagcccattccggccacgcctatggtgcgcgggacgggcggcaactgcgtaaagtatggcgtgccgcctgtcggcaggcttgcctggttgcctgtggttttgccgttatttatctgttcgccgggcagcagattgtggcgggcttaacctcgctgccggaattgcgtgcgctggcaaatcattatctgccttggcaggtggtactgcctctggtgggggtttggtgctacctgctagatggcatgtttatcggtgccacccgtggcgcagaaatgcgtaacagcatggcggtagccgcagtgggctatgggttgacgttgttcaccctgccggtattgggcaaccacggcttatggctggctctggcggtattcctggcacttcgcggggctgctttgggctgggtatggcatcgtcatagcgtgcagggcacctggttttcatccccccattagcgatggataggccagactagttgatgatacgggatgggtattcacatttagttacatgtgctgagggctgttttggttcgcttgcttactgttttaacggcgttttttgctattaagacttttcttaaccctatttcatgctgcttttcgcgcacttttcgtgatgggtgactatagttaatcacgtggctggcgaattaagcccgcgcttaattggcaacggacgcattagataaccttaaatttgactcagttaagtccagccagatttatctaaaactgacaaccaagagtaacggagagattatgaacaaagatcaagccgacggtaactggaagcagtttaaaggtaaagtgaaggaaaaatggggcaagctgaccgatgacgatatcaccgtgatcgaagggaaacgcgaacagctggtcggtaaaatccaggaacgctatggctaccagaaagaggcagccgaaaaagaagtcaaagcctgggaagagcacagcaagtatcgttggtagcgcgatgagccgctgagtattgcggcgctacgacaccatccggcctggcagatttcccccctgccacggccacgggaacaaggatgtacccgctccctcctgcaatccaatccgcttattttttctttaccacaatgctgtggtcatgatcgcaatcttgttggttctcacaattttctaccaccacacagccagaacacagaccgtgggcttccactacgctgtggcgcagcacaaatcctgattcttgagccagtttctgcaaggtttcttctaccccttcggtagtacgctccgtgacctgtccgcagcgatcgcagataaacagggcagaggtatgcataggttgttcgaagtggtggcacagcacatagctgtttgccgattcaacgcggtggataaacccctgttccagcaagaaatccagtgcacgatagacggtaggtggtttggcctgcggctctgccacacgcagtaaatccagcaaatcgtaagcgctgatggcgccgggttgctcagccatcaggcgtaacacttccagccgttgcggggtcagtcgcacgttgcgttgctgacagagttgttcagcctgcgcgagcagcttttcctggttggttgagttcatggcaagtatccggctatgcaaagaagccgattttatcatgtttcaacgcaatcgccgagggttgccccgctttccctggataacgcggctaatagggcgattttccgcagcaagactaggcagaatgagatgcgggtcacggtttgccgctttatgtcataggttccactcgggcacggcggtataacccatatggagccaaacctttcaggagcctgggatgtcagaaagagagaaattgctgcgcggcgaggtctataacagccgtgatgatgagctgattgccatgtaccatcgggcgcggagcctgactaaacagctcgcagcgttggattcacatcagtctgaagagaaacagcgtctgttgcgtgagctgcttgcggcctggggggatgacagctggattgaattaccgttctggtgcgactacgggcagcatatcagcattggcaggaactgttttatcaacgtcaatgcggtgtttcttgactgcaacaccatcaccattggcgataacacgctgattggcccgaacgtgcaaatctacacgccaagccaccctctcaaggccagtgagcggtttaccggcaatgctgattttccgttccatacctcagccaggccggtggtgattggcagtaacgtctggattggcggcaacgtagtgatcctgcctggagtcaccattggtgatggtaccaccatcggcgcgggcagcgtggtgaccgaggatattccggctaacgtgttggcgcttgggcagccgtgccgcgtgatccgacaattggaataaggtcgtgtgaaaacgttatcgctctgagatcctaatcaggatgaacgacgattttcccaagagcgtggattgtcgttataatagccgtttgcggcatcggcacagcgcgtcggttgtcgagtcccggacttatcaggtagccagtaactcagcatgacgaaagatattaacaacacccaatacgccgccaatcgtttctccattgctcctatgttggactggaccgatcgccattgccgttacttccatcgtctgctgagcaaggaaacgctgctgtacacagaaatggtgaccaccggtgcgatcatccacggtaaaggtgactatctggcatacagcgaggaagaacaccccgtggcattgcagttaggggggagcgatccggcagcattggcgcactgcgccaaactggcggagcagcgtggctatgacgagatcaacctaaacgtcggttgtccgtcagatcgggtacaaaacggcatgtttggtgcttgtctgatggggcaggcgaccttggtggccgactgtatcaaggcgatgcgcgacgtggtgtcgatcccggtgacggtaaaaacccgtattggcatcgatgaccaggacagctatgagttcctgtgcgattttatctctaccgttgctgggcgcggggaatgcgatatgttcaccattcatgcccgtaaagcctggctttctggcctgagcccgaaagaaaaccgcgaagtccctccgttggactatccgcgcgtttatcagttgaaacgtgacttcccggcgctgaccattgcgatcaacggcggcgtgaaaacgctggaagaggcccaacagcatctgcaacatctggacggtgtgatgatggggcgcgaggcgtaccagaatccaggcattctagcgcgggtagacagcgagattttcggccgccagagcgaggtgatggacagcgtggcgattatcgaatcgctgtatccgtatatcgagcgcgagctagcgaacggcacctatctgggccacatcactcgccatattctcggtttgttccaggggatccctggtgcgcggcagtggcgccgtcatctgagtgaaaatgcccataagccaggagctgatgtgcgcaccgtcgaacaggctttggctctggtgcgttctccgcgtactgaaatggcataatcgacaaaaaacttgactaaaagttggtttttttgactaatggcgtcacggggtgtggcgctatttttccataatttcaataagttatcattaacttcaagttggcacgtttcttgtaaagaacaagatagacctattgttttgccaaggagcaacccatgttagaactcttctttctgatcggctttgtcgccatgctgctggtaaccggtatttcattgctgggcgtgatggctgcgttatttgtggccgcggcttttatgctgctgggcgggctgtttgccatggtgtttaaactgctgccgtggctgatcctggcggtgattggcgtgtggatataccgctctatgcagaaaccacagatacggcgctattaatattttttgccgaaatatcagtcagtcacgctgaaactcaccctgcagattgcttgccagtgtggtggtgatcacagcttgatgttttaaatgtgaatacggcacattaaacatattttttacttatcgaggctgctaggatgactcccgcagcagtgatgctaatcattttcatcaccgcgagagctgacaagagtgttgcttaaagcaacccccatctctggcggactctgctctacccctacaaaacgcagtaaactagaaagggctccttatggagccctttctttattggcgctacagaccagggatcagcaggctggagccgctggtttggccgctttccaggacctggtgtgccctctgggcatctgccaatgcaaacttctgtgtcgctttcacatcaactttaattgcaccgctgccaatcagcgaaaacagctcgttactggcaaactgcaattcctgacggttggtgatgtaaccattgagcgaagggcgggtgacgtaaagtgagcctttctgattgagtaacgccagatcgacgccagtaaccgggccagaggcattaccaaagcttaccatcagcccgcggcgcttcaggctgttcaatgagtcctgccaggtactttgccctacggagtcatagaccacgttaaccttttcgccgttggtcagttcagctacgcgctgggcgatgttttcctggcgataattgatggtggcccaggcgccggcacgcaatgcctgctcggctttctcgtcagaactcacgctgccgatcagtttggcacccaacgctttggcccactggcaggcgatcagcccaacccccccggcggcggcatggaacaggaatacctcgcccggcttgacctcataggtttgtcgtagcagataatgtacggtcaaccctttgaggaatgaggctgcaccctgttcgaaagtgaggttatccggcaagatagccaccttttccaacgggacgttgtgaacttcgctgtaggcacccagtgcggactgggcataaaccacgcgatcgcccggtttgaccgcgctgacacctgccccgaccttgatgaccaccccggccgcttcggtacctaacccgcttgggaagtttgccggtgggtacaggccgctgcgtacgtaagtatcgatatagttgataccgatcgccttgttctcgacctgaacctcccccgctgcgggatcgacaggagtaaaatcaacatactgcagcacttccgggccgccggtggcggagaattggatgcgttttgacatgtcgctacctcgtttaaatggctgttttcaccctacgcttatcagcccagactatctagcccgttgcgcagtgattaatccttttttgcgcagggaatcatgactgaaaatcacgtatactcttgcgtcagctaccccccattcgcaactgaataaagaataggcttcatggcaggcaaaaaaccaaccaacaagacaaacacgtacgaacccagagaccgccagatggaagggctgaagatgccgccacattcgctggaggcggagcagtccgtgttgggcggtttgatgcttgataacgaacgctgggataacgtggcggagcgcgtagtcgccaacgacttcttcagccgcccacaccgcctgatctttaccgaaatgcagcgtctgctggagatgagccggcccatcgacctgatcacgctgtccgagtcgttggaacagaggggcgatctggagacggtgggcggttttgcctatctggcagaattatcgaaaaacacccctagcgcggccaacattggtgcgtatgccgatatcgtgcgtgagcgtgcggtcgtccgtgaaatgatctccgtcgccaacgaaatcgccgatgcgggttacgatccgcaagggcgtagtagtgaagatctgctcgatctggccgaatcacgggtattccagatcgcggaaaaccgtgccagcaaagatgaaggccccaaaggcatcgaacgtattctggaagatactgtcgcccgcattgagcagctctatcagcagccgcacgacggcgtcaccggcgtagacaccggctatcacgatctcaacaagaaaaccgccggtctgcaaaaatctgacctgatcatcgtcgcggcccgtccggcaatgggtaaaaccacctttgcgatgaacctgtgcgaacacgctgcgatgacgcaggataaaccggtgctgatcttcagcctggagatgccctgcaaccagatcatgatgcgtatgctggcctcgctgtcgcgcgtggatcagacccgtatccgtaccggccaactggatgatgaggattgggcgcggatctcgagcaccatggggatcctgctggagaagcgcaatatgtatattgacgactcctctggcctgacgcccaccgaagtgcgctcccgcgcgcggcgtattttccgtgaacatgacgggatcagcctgatcatgatcgactacctgcagttgatgcgcgtgccgtcactctccgacaaccgtaccttggagattgccgaaatttcccgctcgctcaaagccttggcgaaagaactgcaggtgccggtggtggcgctgtcgcagttgaaccgtagcttggagcagcgtgccgataagcgcccggttaactccgatctgcgtgaatctggctccatcgagcaggatgccgacctgattatgttcatctaccgtgatgaggtttatcacgagaacagcgatctgaaagggattgccgaaattattctgggtaagcagcgtaacggccctattggtaccgtacgcctgacctttaacggccagtggtcgcgcttcgataactatgcggggccacaatatgatgatgaataatcagctaaggaattgaaatgaaagcggcaactgctgtcatcgatcgccgcgctctgcgacataacctgcaacagatccgtcgcctggcgccgcaaagccgcctgattgccgtggtgaaagccaacgcctatggacatggcctgttggaaacggctcacaccttgcaagatgccgactgttacggcgtagcgcgtatcggcgaagcgctgatgctgcgtgccggtggtatcgttaaaccgatcctgctgttggaagggttcttctgtgctgaagatctgcccgcgctggtggcgaataatatcgaaaccgccgttcacagcatcgaacagctcgaggcgctggagcagattgaactggcgcacccggtgtcggtatggatgaagctggatagcggtatgcatcgtctgggcgtgcgtccggaacaggcagaggcgttctaccagcgtttgagcgcctgtcgcaacgtggtgcagccggtcaatatcatgagccacttcagccgtgccgacgagccgctggtggatgcgaccgaaaagcaaatcagctgctttgagcgcttcgccaacgataagccgggcatgaagtcgatcgcggcctccggcgggatcttgctgtggccacaggctcattttgactgggtacgcccagggattatcctatatggcgtatccccgttggaggagccttatgccgatcactttgggctgcaacctgccatgacgcttaaatccagtctgatagccgtgcgtgagcatcgtgccggagagccggttggctacggcgaactatgggtgagtgaacgagatacccgcctgggtgtagtggcgatggggtatggtgacggttacccacgcagtgcgccttctggcactccggtatggctgaacggacgtgaagtaccgattgtcggccgtgtctccatggatatgatttccgtcgatctggggccggatgccagcgataaagtgggtgatgaagtggtgctgtggggcaatgagctgccggttgaacgggtggctgcctttagcggcatcagcgcctatgagctgatcaccaagctgacccagcgcgtcacgatggaatatatcggcgagtaatttccctcatcttctccctgcgggagaagatgaggaggcattcgtcagcttacttctccccccccagccactggccgataatcttctggtactccccgctggccttgctcaagtgcagccattgatcgacatacagcttccaactcatatcatcacgcggcagcatataggccttctcaccgtattgcatcggcttatccgggttcaccgcacacagcttgggatagcgtttctgctggtacagggcttcggaggcatcggtgatcatcacgtcggccttgcggtccaccaactgctggaaaatgcccatattatcgtgggacagcgtcaggttggccttgggcagatgggcacggacaaaggcttcgttggtgccaccggcaggctcgatcagccgcaccgcaggtttgttaatctgctcaatggtgcggtattttttcacgtcggtacaacgcaccagtgggattttgccatcggtatcaagccgctcggcaaaaaacacctgcttttggcgctccagcgtcactgagatccctcccatggcgatatcacacttcccggccacaaagtcaggtgtcagggttttccaggtggtttttacccatttcactttggcccccaggctgttggctagcgactcggccatggcgatatcaatgccttcgtagctgccatcctctttctggaaggtgtagggcttgtaatcgccggtggtacagaccgtcagcgttttttgctgcaataccttgtccagattggattgtgcgctggcgctcccggtggcgaccagcaaggcgagaggcaatagttttttcatcaaatttccttttcatgtcgacaaatacatttgtggttttatgcgcggttttgccgttaattgttgttggtttgcgtaatttagccgttttttatgccatttctgagcagggaagctggctttgctgctatgtctctcacaacccgccagcaccgatggttgcaaggctaaaaaagctgctagtctgtagcgtcaacatttattaacacattttacaggtggctatgtacaacattgacgattttgatatgaaaatcctgacgctgttacaggccaatggtcgtctgaccaatcaggaactgagcgaactggtcgggctttcggcctcgcaatgctcgcgccgccgtatcagcctggagcaggcccaattgatcaaagggtatcatgcccggttggcaccggaggcggtgggattggggctggtggggctgatagaggtaagcctgctgacgcatacccaagagcagatcgacagttttcatcagatgctggcagaagtggacgcaattgttgacgtttataaaaccaccggcgatgccgactacctgctgaaagtagcggtagcagacctgcccgcgttaagtgagtttatcagccagacgctttcccgccataaaagtgtcggacatatcaaaacggcggtggtgctggaacggatcaaagaaaacggtttgcttccggtagcgagataaagctaaaacccaacgccaatttgtggctatagtaggctgtgtcccccaattgaccgtggtgccgtcgcagacccaaaagccctaatcaaggtggagggtgcagggcctagacagtgtccgaataaccaaaatcaggagaaccaacccgtgttccagaatgttgaagcctatgcaggtgacccgatcctgtcgctgatggaaaaattcaaaaaagatccccgtgcgcacaaggtgaacctgagtattggcctttactacaacgagcaaggcatcatcccacagatgaaggccgttgccgctgctgaagcccaacttaacagcgttgaacagggggcctcggtctacctgccgatggaaggcctacagccttaccgtagcgcaatccaacagctgttgtttggtgccgaacaccccatgctgcaacaggggcgtatcgccaccattcaaaccgtgggcggctctggtgcgttgaaagtgggggccgacttcctgaaaagctatttcccggattctcaggtttgggtcagcgatccgacttgggaaaaccacgtagccatctttggtggtgctggtttcaaagtgaatacttacccctatttcgacggtgaaaaactgggggtgaaatttgatgccatgctgagcacgttgcaacagttgccagccaagagcattgcgctgctgcatccttgctgccataacccgaccggttccgatcttaccaatgcccagtgggatcagatggttaaagtgatcgccgaacgtgaactgatcccgttcctcgacatcgcctatcaaggctttggcggcggaatggatcaggatgcctatgccattcgcgccatcgcagctgccggtttgccgtgcctggtgagcaactcattctcgaaaatcttctcgctgtacggtgagcgagtgggtgggctttctgtggtgtgtgaaagcagcgaagctgctgaacgcgtgctggggcagttgaaagcgaccgtgcgccgtaactactccagcccaccgaacttcggtgcgcaggtggtggcaaaagtgctgaacgatgcgcagctgaaagcgcaatggctggccgaagtggagtccatgcgcagccgtattctggagatgcgtaaagcgctggtcgaaacgctcaagggcgcattgccacagcgtaacttcgattacctgctcgagcagcgcggcatgttcagctacaccggctttagtgcggctcaggttgatcggctgcgtgaagagttcggtgtctatctgatccacagcggccgtatgtgtgtggcgggtcttaaccacaataacgttcgtcaagtggcagaggcctttgctgcggtgcagtaacggcctgaatgcagtgattttaggggcgatagcgatatcgccccttgttgtttctgcgtactggcgattgccgccaacgggataaagaatatactgattgagggcgctaagacttttcgtatgcgccataaagccctgctttcagcgaccaggcgcggttctctacctgactggcagggtatctggctggcaacagcatactcacagtggttcgcgccgcattgtgtcttggcgggaaataacccaatgaataactcagcactgctggaatactgcatggcgaaacctggcgcacaccaaagcgatcaaaaccaatggcaggccagccagatcaaggtgggagatgtcatgttcgctatggtgtgtgaagtacaggggcgcccggcgctagcgatcaaaagtagcccggagctggcggaaagcctgcgtgagcagcatccggaaatcgtcccctgcgaacatctgaataaagcccattggaacgcggtatttctggatggcaacctgcccaactcgcagttttatcacttgatcgacagctcatatcggttggtgctggaagggttgcccgatcaggtgcgccaagagctgcgcatttgaatttataggtggccaggcctgttggctcaagaatggcgacaggccaagaggactacgtcccccgatatctatggggaaattttattttgtaggtcaatattgttcattgcgttatttagtcctgagaaacaggattggcaaggtttttttgtggttaattccgctgattggattattttatattaatttttgataattttaagattgataaaaataggttgataatttattttcaatagcacgacactgttaattaagagagttctcattggaatctaaattatgactgtgttactaatgcgtctatattaatctgctcaaaggcaaataaggataaaggatccctaggggaacctactaaaaggaaatttaattatgaaactgcatcattcaatatttttggtactgccgctgctcgtttattcctcattatcattagcttcgccaaattgtgcaataaaagaacaaaaactgcgagagcagctcgattacgcgacgcgttatggcaatgtccatcgtgttgaggggcttaatcgggccttggccaatgtgcagacctactgccacggtagttatcaaggtcgttataatagatacgattatgcgccagccgctcagccgtttgaatttgatcgccagtatcaaattgcaaagaagcaacgaaaagtagaaaaaagaaaacaagagctgcatgaagcccagctcaaaggcaagccgagcaaaattgctaagcgacagagaaaactagccgaagccgaatttgaattgaagcaggtgcaggcatggggaggataacctggccgatatgagcagatgttagcttcagataaataatgccgagttttggcggtgagagtgatttggccactgagtcggcacgttaagcgttttacctatccgtccgtgtgacagttaaaaccccaaatccgctcccgcctttctaaggtggaaacttattgctgtccccaggttgcgccgtaataatagccaacatgccgagcttaggtgttcggcatgttggccacggttttatctctgcaacatcggtttcaggaatcgcgcggtatgggactctttacagttggccacggtttccggcgtgccggacaccaggatttcaccgccgccgctgccgccttctggccccagatcgacgatccagtctgccgttttgatgacgtccaggttgtgttcaatcaccacgatggtgttgccctgatcgcgtaactgatgcagcaccgccagcaactgctggatatcggcgaagtgcaggccggtggtgggttcatcaagaatatacagcgtctggccagtgccccgtttcgacagctcacgcgccagtttcacacgctgcgcttcaccaccggaaagggtggtggccgactgcccgagacggatataggaaagcccaacctccatcaacgtttgcagcttacgcgccaaggcgggtacggcatcgaagaattcacgggcttcctcaatggtcatttccagcacttcgtggatgtttttgcccttgtacttcacttccaacgtttcgcggttatagcgtttgcctttgcactgatcgcaaggcacgtagatatccggcaggaagtgcatctctaccttgatcacgccgtcgccctggcaggcttcgcagcggccgcccttgacgttaaagctgaaacggcccggcgtatagccacgggtacgggattcaggtaccccggcaaacagttcacgcaccggggtgaagatcccggtataggtggccggattagagcgtggcgtacggccaattgggctctgatcgatatcgatcaccttgtcgaaatgttccagaccggtcacttcgcggtaaggagccgcttcggcaatggttgcaccgttgagctggcgttgggcgatcgggaacagcgtatcgttgatcagcgttgacttgccggaaccggaaacgccggtaatgcaggtaaacagcccgacaggcagcgtgagcgtcacgtctttcaggttgttgccgcgtgcgccgctgagtttcagcaccttggtcggatcggcgggcacgcgttcggccggaatggcgattgagcgcttgccgctaaggaactggccggtcagtgaatccggttgggccatgatgtcatcgacggtgccttccgctaccacctggccgccgtgaacaccggcaccagggccgatatcgatcacgtggtcggccgcgcggatcgcgtcttcgtcgtgctctaccacgatcaccgtgttgcccaggttacgcaggtggatcagggtttccagcaggcgttcgttatcgcgctggtgcaggccaatggaaggctcatccagcacgtacatcacgcctaccaggccagcaccgatctggcttgctaggcgaatacgctgggcttcaccaccggacagcgtttccgcagagcgtgacagtgaaaggtagttcagcccgacgttaaccaggaacttcagacgatcgccgatctctttcaacaccttctcggcgatctgggcacgttgaccgctcagtttcatattctggaagaaggtcatggcatggccgatgctgagctcagagatctccggcagcgtagtatcttccacgaacacgttacgggcttcttcacgcaggcgggtgccacggcacgaggcgcaaggacggttgctgataaatttggcaagctcttcacgcaccgcactggactcggtttctttgtagcggcgctccatattatgcagcacgccttcaaacggatggcggcgcacggtggtgtcaccgcgatcgttgatgtatttgaattcgatcgactctttgcccgaaccgctcagtaccgctttctgcacgttggcatccaggctgctgaacggggcttccacatcaaagctatagtgctccgccagcgagcgcagcatctggaaataatagaagttacggcggtcccaaccgcggatagcgccaccggccagagaaagctcgggattctgtaccacacgttcaggatcgaagaactgctgcacgcccagtccgtcacaggttgggcaggcgccggctgggttgttgaacgagaacagccggggttccagctcgcgcatgctgtagccgcagatggggcaggcaaagttggcggagaacagcagttcatcggccttttcgtcatccatatcggcgacgacggcggtaccgccggacagttccaatgcggtttcaaacgactcggccaaacgctgtgccagatcgtcacgcactttaaaacggtccaccaccacttcaatggtgtgtttcttttgcagctccagctttggcggatcggagagatcgcacacttcaccgtcgatgcgcgcgcggatatagccctgggttgccaggttttccagcgttttggtgtgttcgcccttacgatctttcaccaccggtgccaacagcatcaggcgtttgccttccggctggttgagcacgttatccaccatctggctgacggtttgtgccgccaacggaacgtggtgatccgggcaacgcggttcgccgacgcgggcaaacagcaggcgcaggtaatcgtggatctcggtaatggtcccgaccgtggagcgcgggttatgcgaggtcgatttttgctcgatggagatcgccggggacagaccttcaatatggtcgacgtccggtttttccatcagcgaaagaaactggcgagcgtaggcagagagcgattcaacgtagcgccgctgcccctcggcatacagtgtatcaaaagccagtgaggacttgccggaacctgatagaccggtaacgacgatcagcttgtcgcgcgggataatcaggttgatgtttttgagattgtgggttcgagcaccacgaacttcgatattgtccatttacacttcccgtcttgatgatacaccgcgcctgtctgcgttcttttgtgggcgattatgtgatctattgcgcaaaaaaacggctcggccagtacgaaacgcataattatggcacaaaaaaacctgaatgaatatccagtatacgaatgcaacaaggtcgttcgcagcgacatttttggaaggcacttcgcaggtataatctaagcaggtggcatgctacaatttgtggtttagactatccaaaatgtggtctgaatccacttaaatgactcatcgggagatcgaacatggccagcagaggcgtaaacaaagtaattttggtcgggaatctgggtcaagaccctgaggtccgttacatgcctaatggcggcgcagttgccaacattaccctggcgacctccgaaagctggcgtgacaaggctactggcgagcagaaagaaaaaacggaatggcaccgcgtggtgttgttcggcaagctggcagaagtggcgggtgaatacctgcgtaaaggttcccaggtttacatcgagggtgcattgcagacccgtaaatggaccgatcaggcgggcgtagaaaaatacaccaccgaaatcgtggtcaacgtgggtggcaccatgcagatgttgggtggccgccaaggtggcggtgctccagcaggcggcggcgctccagcgggtggccagcagggcggttggggtcaacctcagcagccacagggcggcaaccagttcagcggtggtcaacagcagcaggctcgcccagcgcaaaacagcgcaccagcagctagcaacgaaccgccaatggactttgacgacgatattccgttctgagtgcgccgttttgctttgtaaatcaagtggttatctcatttcttcgaggtggccataggctgttggagtgcctattgcaagcctgacttatccttacccagtaatgggtttgaacctcgaaagaggaaggggagtgcagcatgtcaggaaaaggctggttgcggggaaataacctactttgcgccagccattgcaagtcccatatggttaagcctgattggttgaatcatagttcatagtgggtttcgggatacctttgactcacggttattcaggagtcatatcagtatttataggggttattgttagaaggccgctatatccaacaatattggcacctactcggtgagagtggcaattgaacgtaagtggaacctaagtgggacgtaccttgactacaaagaaatacgggattacctaagttggttaagtcatcaaccaataaggtaacggagacttcgtagtacccaacgtagctctgtaatggagtagcaattggataaccaatctgaaaagtgtatataaatcgataagtaactatcggtgaaattatacttgtaagggggaagggagtcagttggatcgatactaatagaagcgaggttcgatagtcagtgctatcacaacgaacactcaatgctctaaatggtataagcaaggccagcatacaaggtcataaggtcaagaaactacataaaattatgtgtagcaataaggatctttgggcgcaggcatatgcgaatatttattccaatcggggagctatgacgaaagggatagataataatacgatggatgaaatgagcgtcgataggattattagtcttattgaaaccattaactcaaacacgtatagccccaaaccttgtaggcgcatatacatacctaaagatgcccaaaagccgaatggaaagagacgtccactgggtattcctactggagatgataaattagtacaggaggtaatgaggatgctgttggaggagatctatgagccaatctttagcgattggagttatgggttcagaccaaagcggtcctgtcattctgcattaaaagaaatcagaaacagttggaaggggactaaatgggtatgtaatgttgatatccaaggttactttgacaacattgaccatgatcttcttcagaagtttttaagtaagcggatcactgatagcaaatttctggcacttctcaagaagttcctgaaagctgggtatctggacaattggcgttactttggcactcacagtggcacgccgcaaggtggtattatttcccctgtccttgccaatgtatttctccatgagcttgatgaatttatgaaagatagaatcagcaagttcggcaaaggaggaagaaggaagcctaatcccatatataaaagagcactacaaaaccgagcaaaccgtattaaatggatcaggcaaggtttcggcgcctctggaatgactgctgatgagcagaaaatccaaagatggaaacacgaagcggatgaactggaaaaacaattgcgtagtttacccagtgttatcacggacgatactgagttcaaaagaatgcgatatgttcgatatgctgatgattttctgataggtgttataggaagtaaaaatgaagcagaaacgataatgaaagaggttgtcgattttgttgaaactgaacttcacctcgaaatatctaaagaaaaatccagcattattgacccaaagaaaggattcactttcctcggctatgaggttaaagcacgtcgtgaaagcaaacaggtcaaatgtattgtggggcttaaaacagatggaagcaaaattcatgcggtaaaacgcacgataacggaacatatccatctgggagtaccgagagagagaatccagaagttttgctctctgcatggctatgggtattacgatggcggatatggtaacagcactagtcggccagcaatgatgcatatgtctgactatgaaatcattggtcaatacaatgctgaaatgcgtggctacgcaaattactacaatcttgcaccggctctctatctcaataagttgcattggatatgggaaaacagtctttataagacgctggcaggtaaacatcaaacatctcgcaccaaaatcgcaaaacgattaagacatgcagatggcaggtctgtttatcgggaaaatcgtaatggtaggatatatgagttagaggtgttcagactcaaaaacagaagtgcgccgaaacatagttcactggatatgttgccgaatacgcatatatattctggaagaactgaactgctggaaaggatggctgcacgccaatgtgaatattgcggtacccgaaccggtccttttgaagtccaccatgtgaggaaacttaaggatatcaaagcgggtacggataactggaagaaactaatgattgcccgtaacaggaaaacattagtgctctgtcaagtatgccacgtcaatcttcaccgaggaacattgccagaccgaagaacctttgtttgatctaatggagagccgtatgcatagaaatgtgcatgtacggttcggtggggggacaacggctaacccgttagggtgcacgtgttctacccaacttgtcctcaggttcaaaacgaaaagcccctttttggggcttttttgctttagagggcattacgccgagaagccaccgtcaatcgtcaggctggcaccggtgatatatcccgcctctggccccgccagataagccacaaagctggcaatctcttcatccttaccataacggccaacggccatcatcggtttcaactgttcggcaaaatcgccatcagccgggttcatatcggtatctaccgggccgggttggacattattgacggtaatgccgcgtgaccccagatcgcgagccatacccttggttaaaccgaccagcgccgacttgctcatggcgtagatcgccccaccggcaaacggcatgcgctcggcgttggtgctgccaatattgataatgcgaccgttgtcgttcatatggcgagctgcctcctggcttgcaacaaatacgctgcggacgttaacggccagcgtgcgatccagatctgctaacgacaattccgccagactacccattgccagcacgcccgcgttgttcaccagaatatccagcttgccgaagctgtttaccgtctggcgtatcgccagttgcagagcctcagcgtcggcactgtctgcacggatggcaatggcttgaccgccagcggtcgtaatagcttcaaccacctcatcggctttatcgggggaggaaacgtaggtgaaagcgacggttgcgccttcacgtgccaagcgcttaacgatggctgcaccgataccgcgtgaaccaccctggacaaaagccactcggcctgacagaagttgggttaccgacatgatatctctccaaaagttgtgatggtgataaatagcaactgcagtatctgggaaaacgcaggcaggggattgccaaaatgggccatgtgccggttggctggcggggatgggttacattatagagtagtctggttgttccggtttttactaccggttaaaacgtgaaaagccccttgcggggctcataatctgacgattagttaaagatttctgcggtgccgtacagcttgttctggccaccggcggacacgatgcggtaagagttggcaccggatgcggcggctttgcttgccagttcggcttccagagcgctcaggttgctggcaccgcttacggaaaccacaccgattttttgtgcgtcggcagcgggttggctggtgacctggtcagcggcaatgctggcgaaagaagcggaagttaacagtacagcagtagcaaaaattttgatgcttttcatgattcaatcctcaggggttttgttaggtgagaggctgttgtctctcgatgtgttgaatgataggccacttggtgggaatggaaaatcggagagttttgagtatctttgtcaaataaaatgaataaatagtgtgattggcgatagttgaaatcacaactaccttttaaccagggcgtttaaggagtgtatgtgatgatggcagaccggtttattggcagttgggcgctggtttcttccgtattcaaaggggaggatggggcaatacatcaccctttgggcgagcaggtgttggggcggctcaactatgaagccaacggcaccatggcagcgcagctctatagcgcaacgcggccaaggtttgcctcggaggatttggcgcagggcagcgatcgagagagccgccccgcctttgtgaatatgctttgttactttggccgctatcggattgatgaagataaacagtgcatcattcatcgggtcgagggctgttcgttccccaactggctgggtagccagcagatccgcttctacagtttcactgacgataaactcacattacgcaccgtaccgttgcagctgggtaacagcgtgcaaattggcgaattggtgtggcaacggctccaggccgctgagggagaaaaatcatgattatcgtgcatcatctgaataactcacgttcgcagcgcatcttatggtttctggaggagctcggtgttccctatcaggttctgcgttatcaacgcgataaaaccaccatgttggcaccgcccgagttgaaaaagatccatccgctgggcaaatcgccggtagtggtagacggcgatctgacgctggcggaatcgggcgccattatagaatatctgcaggaggcctatgatgcacaagggttattcactcccacggatttccacgcccgccaggagtatcgctattggctgcactatgcagaagggtcgttgatgccgctactggtaatgaaactggtgtttagccgtttaggacatccgccaatcccatgggtgatacgcccggttgccggggcgatcggtaaaggggtacagaaagagtatctggataagcagattgcgacgcatcgcgattatctggagcaacacctgaataaaaacacctggtttgtgggcaatgaattcagcgcagcagatatccagatgagtttcccggtggaggcactagctgggcgaggcgggctggaggggtgcccgaaactgcaagactatctgcaacgcattcacgcacgtcctgcgtatcagcgggctctggaacagggtgggccgtttagcgtgctgggttgaaggcttgaactatactcgatagggtcactttcataggagatagcccatggctacgcaaatttttgttaacctgcccgtcagcaatttgcccgcttctatcgagtttttccgccaattggggtttaccttcaacccgcagtttaccgatgacactgccgcctgcatggtcgtgagtgagagtatttacgtgatgttgctgactcacgagaaattccaactgtttacccccaatcctatcagcgatgccaacaaagcgacggaagtgctgatttgcctgtcgcaacccagccgtgctgcggtagatgcgttggtacgcaaagccattgccgcctgtggcaatacctataatcagccacaggattacggcactatgtatggccatggcttccaggatttggatggccatatctgggagttgatgtacatggatgagcaggcgatgcaatcgcaataatcttttccgccccaagctgtcggggcgaacttccccctttaagtcgtaatgtgattaacctcacatcttcaacaatgatggctgccaatacgttttcgcataaattgtcgcgatctttagttgatcagacggtatagaaggctagataatcgtttgccttgaaaatccctcccggtagcgtttgggattttttggggcaagaccaccataaatcacccgctgcatgcgatgagagttaaacgtttgccttttacacggcgtctgttgccgcgttcctgaagggtaaggacgcgaacgtgacggaaacggtttcgtaatgaccatgcatcagtgggataacaagccatttcatccaggctggcagcaatgaaaaacaggggacagcaacatgtcgaattctcaagcaaataacgccgtgacacccaaaggcgggcttgatgcgtattttaaacttacagcacggggtaccaacgtgcgtcaggaagtggtggcagggttaaccaccttcctggcgatggtttactcggtggtcgtggttcccagcatgctgggtaaagccggtttcccaccgactgcggtattcgttgccacctgcctggttgccggtttgggatcgctgctgatgggcttgtgggccaccctgccgatggcgattggttgtgccatttcactgacggcgttcaccgcctttagcctggtgctgggtcagcacatcagcattcccgtggcgctgggcgcggtattcctgatggggatcctgtttaccatcatctcgattaccggtatccgttcctggatcctgcgtaacctgccaatgggagtggcgcacggcaccggtattggtatcggcctgttcctgctgctgatcgcggctaacggtgtcggcctggtggtgaagaatccgctggatggcttgccggtcgcgctgggggcatttacctcgtttccagtggtgatgacgttaatcgggctggcggtgatcttcggcctggaaaaactgcgtgtgccaggcggcatcttgctggttattattgccatttcggttatcggcctgatttttgacccggcggtgaaatatcaagggctattcgccatgcctagcctggcggggccagatggcaaatcgctgatcttcagcctggatatcatgggggcgttacaaccggtggtgttgccaagcgtgttggcattggtaatgactgcggtgttcgacgccacgggcaccatccgtgcggttgccgggcaggccaatctgctggataaagatggccagattattaacggtggcaaagcgctgacttccgattccctgagcagcatcttctccgggctggttggggctgcacctgccgcggtttatatcgaatctgccgcgggtacggcggcgggcggtaaaaccggcctgacggccaccgtggtcgggctgttgttcctgctgatcctgttcctgtcgccgctgtcctatctggtgccagtgtatgccaccgctcctgcgctgatgtacgttggcctgctgatgttgagcaacgtcaccaagctggatttcgacgactttgtcgacgccatggccggtttgctgtgcgcggtgtttatcgtgctgacctgtaacatcgtgaccggcatcatgctgggcttcagttcactggtgattggccgcgtgttctctggtgaatggcgtaggctgaacatcggtaccgtgttaatcgcggtggcgctggtggcgttctatgctggcggctgggcaatttaagccttccttcaatggggctgacctccggccccgttgtttatcctcttcagactattctccttatcttctgcgacgtgttttgaaaggcacaacaagctttatccgtacctaaaaaagtgatctactatccagatacttttacccgcgctttggtgatacgagctcaagagtctaaggaaagcatggaaatcttttttacaatcctcattttgatcctggtggtctccctgtctggggtggtaacacgtatgttgccgttccagatcccgttacctttaatgcagatcgccattggggccttgctggcctggccgcatttcgggctgcacgttgattttgaccccgaactgtttttagtgctgtttattccaccgttgctgtttgccgatggttggaaaacaccgacacgcgaattcctgcaccacgggcgtgaaatcctggggttggccttggtgctggtgttgatcaccgttgtcggcgtgggttatctcatttacctgatggtgccagggatcccattggtcgccgcgtttgcgctggctgcagtgttgtcacctaccgatgccgtggctctgggggggatcgtcggcaaagggcgcatcccaagaagtatcatgggggtgttggaaggcgaggcgttgatgaatgacgcttccggcctggtatcgctgaagtttgccatcgctgtggcgatggggaccatggtgtttaccgtcggtggtgccactatggaattcctgaaggtggcgatcggtggtctgctggccggtgtggcggtgacctggacctacagtaaatcgctgcgcgtgatgagccgttggagcggagacgatccggccacgcagattgtgctgttgttgttgttaccttttgcttcctatctgatcgccgaacatatcggcgtgtccggcattctggctgccgtcgccgcggggatgaccatcagccagtctggcgtgatccgtaacgcaccactggccatgcgtttgcgtgcgaacagcgtctgggcgatgctggagttcgtgttcaacggcatggtgttcatcatgctggggctacaactgccggggatcctggaaacctcgatcgtgcaggctgagctggatccgaccatcgagacctggtatctgttcaccgacgtggcgattatctatgccgcgctgctggtgctgcgtttcagctggttgtgggtgatgaaaaaggccagcaatcgctttatgaaaaagcgccctctacagtttggcgattacagcatacgtgagctgtgggttgcttctttcgctggcgtacgtggggcgattacgctggctggtgtgctctctatcccgctgttacttagcgatggcaccgccttcccggcgcgctatcaactggtgtttatcgccgccggagtgatcttgctgtcactgatcgttggcgtactggcgttaccgttattgctgcgcggggtgcatgtcgcagacaagagcgccagcaagaccgaagaacgtatggcgattgccatggctgccgaggtagcgattgagagcatcaacaagatggaagaacggctggcggcagacaccgaggaaaacctcgatccgcagttgctgaaagaggtcagttccagggtgaccgggatgttgcggcggcgtattgccagtaaagacgatatcgaaaatgcgctggcgttggaaaacctcgaacggcgtttccgtttgaccgccttgcgggcggagcgtggtgagctttatcacctgcgcgccacgcaaaaaatcagcaatgagacgctgcaaaaactgctgcacgatctcgatttgctggaagccttgctggttgagcgagaaggctaaccacatctttatggggccgctatgcggcccctatcttactcagccaaggcttcggcatctcgttccccttgcgctttactctccttgctttggatcagcttcaacgccagatacaggtcgggaaccaggatcagtttattctccttgctgccggagcgatccaggcgaaaccagcgtgtcagttcggtacggcggcctgcgagcaccagtccaatccctcgcagttgcagatcccgcttcaattcttcgaccgccgcgagcacgctgatatccgcatgggtgaagctggccaccgcgtcaatcaccacccagcgtggctggctcggcgctccatctaccagagtggcgatccgccgcttgaaataagcgacgttaaaataggtcaacggcgaattaaagcggtacataatgacgccatcgacaggctggatcccgttgctcttgtccagcgaatggatcataccgtctgcattgacccccagcagttgctcggtaggccggaaaaccgtctgtagaaactgcaacagacccagcagcaccgccagcccaatgccgggaatgatccctaccagcagtacgctcaggaaagtaaacagcgccaggtagaacgcggggcgattgcgtttacgcagccggaaaatgctgcgcatatccagtagcgaccaagaggcataaatcagcaccacgccaagtaccgggatggggataaactgcagcggctcgctaaaaaatgccactaccaaagcgatcgccagcgcggcaatcaccgaaaccagctggcttttgccaccgttggcatcattaacggcggtacgggagttggcaccgctgatggcgaatccctgcgaaagtccggagacgatattcaccagccccagcgctcgaaactcgctgtcggcgtcaacttcgtagccattttttgccgcaaagctccgggtggtcagcatcatgctgacaaagctgactacggccaggttgagcgccgggatcaccagatcgcgcagcagcccgggtttaaaatcaggccatgacaccatgggcaaaccgccaccggtatagcctccaaccgtttcaatgccaaaatgcggcaaattcgccgcccaggtcaacgccgtcgtcagcaccacggcgaacagcggtgcgggccagttaggccgggcatagtggatgccaagcaggatcagcagcgtcagcagtgacatcagcaccgtgggccaatggctgttgagcaagttaaccggtagcgcgtaaatgcgttcaatcagctcgctggagggcgaggtaaacccgaatatcttgctgatctggttgacgataatcgtaagcgccacaccgttgagcaacccattgaggatcgggcgtgacagtaggtctgcaatggctcccagcttgaagcggctggcaatcaggcaccaggttcccatcatcagggtcatcacgatggtcaattgccagtgcagctcggtatggccagccgctagcggagtgactactgcggcgatgaccgcgcaggtggctgcatcaggcccgacgataagctgacgcgatgagccaaaaatggcgtaggcgatcatcggtagaatacaggagtaaagcccgacgatggcgctcacgccagccaactcggcgtaggcaatcgccaccggtaatgccactgccgccaccgagaggccagctcggatatcaggtttcaaccagctactctcgtaagcgagcaggttcatcaggccaggcgctatactctggagggatttccgctgcatatcttttccatccggctgaataaaggggcatgctgtctctttcgttggccggaagagtaaatcagcggttttttagtgatttttggtgagcattagccgaagtatagcaggggattgtgacctgaattttgcggcacggggcctgatattagactttattttcgctggtgcaggaatggagagactgaaggtgcaacagatttatgttgcacctgactttggccccgtacagctccctcgccctttgggagagggccggggtgaggggaaacagacgacgattaagactgaggccagtactcccggcagcaggcaatccaggcctgggcgctgtgggaaagatagctgccctggcgccagatcagtcccacttgccattccattcgtggctccagtggcagccagatcaggttttctttatccagccattggcagactggctctggtaaggtggcaattcccacgccggcctgcaccatcgctgccagaaaatcccactggccgctgcgtacggcaatcttgggttcaaagcccgcctgctgaaaagctaccatcagcattttatacagcgtgaagtcttcgttataaatcaggattggccactcggccagctcactgatcgcgatgctggtgcggttgagccagtgtgccgtctttggcacaactacgcacatcgggtggcttagcaggggcaaaaaggtcaacggctggtcagatactgcgggcagtatcgtcatcgccagatccaattctccggttaacaccgcctgttcgaccgaaaggccgcccaattcggagatcttcaattcgatacccggataggtctggcggaactggcggatcaaaccggcgatctgcctgccgaccatcggtggaatacccagccgcagcaccccctttttcaccgagctgatgtcctccagttcggcctccagctggcggaattcatccaggatcgccaggccgcgctgataaaccgcctgcccgctgtcggtgaggtgcagcttgcgcccttcgcgcaccagcagtgtgcactccaactcgtcttccagatggcgcaacatcttgctgatggtgggttgggtaacaaacagcttctcggccgcgcgggtgaaactctgctggcgaaccacttccacaaaataacgcagggtgcggacatccactttgggctctcctgaaggcggtgctgccgggaaactattcccttacggcatgatgttgatgattttaattcatttcaggcagggtttcccggctgcgtatactgtaagccgtgattttttctgaggttactttcatgtctctggcgttacgccgtgctgcgcctgcttttctgctccgcctacaggtgcccatccaggtagtgctgtatgctttgttattcctgcttgccgatcggctggggcaacagtttcatttgcctttgcccgccaatatcgtgggtatgttgatgatgctggcgctgatcctgttgcgcattttgccgttgaactgggtaaaagcggggtcgcgttggctactggccgaaatgctgctgttttttgtgccggcagtggtggcggtagtgaactatgcccaactgttgatggtggagggctggaagatttttctggtgatcgctatcagcaccatgctgacgctgggagcgaccgggctggtagtggatcgcgtttatcgtttcgagatctggctgcaacggcggaaaatgcgtaatgaatgacgtgatcctcagcatcacctgcctggtggtgacattggtactctactttgccaataaaaggctctaccgccgccgccgtagcctgctgttgatgccgttggtgctgacgccgatggtattggtgctgttgctggtggtgacgcatatctcctatcagagctatatcggtgaaacgcactggctgctgtggctgcttggcccggcaactattgcctttgccgtgccggtatatgaaaacctgcatattattcgtcgccattggctttctctaactgccggggtgcttaccgcggtggtggtagccgtttacagctcggtgtggctggcccgttggttgacgttgcctgatgaggtgcagcgtagcctggcagtgcgttccattacgacgccgtttgcgctggaagcggcgaagcagatgggcggccaacctgacttggtggcgctgtttgtggtgatcactggcgtgtttgggatggcggtaggcgatattctgttcctgcgcctctcggtgcgcagcggtctggcaaaaggagcggggcttggtgcctcttcccacggagctggtaccgccagagcctatgagataggccagcaagaaggcgtagtgtccagcctggtgatgatgttagcggggattatcacggtgatcggggcgccattgattggccgcttgatgtggtaatgggggcaggattagcccccgacaaggtttagcgagcggcctggaccagggccacaatcagtggggaaagctccccacgtaacgctgcacgttctgactggaacagggtagcggcataaaaacggtgccctggcagctccaccgagcgaacatcgccttcaatatcatgcccactgataatcagtgggtgttgctccaaatctgccacaaattcagggttaaccccaaagttacagtggtagccttcgtgagtctccagcttgccataggcgcgggcaatcagcgaatttggctgaaacaggatggtgccggttttctcaaccagtgaacagctcagcggtgcgatcaccaagcggcccccgctatcggtctccgcgtggccagcatcgtgccaacccatcgcattgcgagcatattccaccaccgcatattgaaacccaccgcaagaccccagaaaggggatgttgtgctcgcgagcatggcggatcgtcataaagacgccgtcatcgttgcgatacgggctgccagggaccacccagatagcatcgtagccctgtagggcagagacatcggtcaacgtttctgtggggagccattgggattggatatcaagattcaggtgtgaagcggtaagttggagagcgacggggatggcttggtgggcaacaatttcgctgcagtaatcaccaatcagagcgagacgaacctgtgttttcatcgtttctttttcctgagcgggtaaaaaaggatgttacagcagagttaaaaacgggtctgtggatttttcaggggggagcacaaaatgttcgagggattgagagcgtgctacacattgtttgccgtatctgatttcggctccgtacggcaccctctccctgtgggagagggttggggtgagggggattgccgctctcggctgagcaacagcacctgccagaaagcgggtttaatacagtgagggcgaacccgccgggcgcgttttgaagcggcggtgcagccacagatattgctctggagcacgcatgatctctttctctaccactttattcatgtaggcggcagcggccacttcattgtcaattgggtagtcttctaacgccggctggatcagcagatcgtagccacagcctttcgggcggcggatcagcacgaccggcaccagcgccggtttggccatgcgggccagcataaaggtaccgctggtggtcgctgcctgatcgacggcaaacagcggggcaaacacgctgccacgcgggccgtaatcctgatcgggagcaaaccatacggcttcgccacgcttcagggcttgcaccatgccgcgcagatctttgcgatccagcatggctttgttggagcgcatacggcctttggtttgtgcccattccatcgctttattgttatgtggacgatacatagccatcattggctgacacaaccccatcgcccggccacccagctccagcgacatgaaatgcaccccaattaccagcacgccacggccattttgttgggcctgtttcaggtggttgatgccggttacgttgaaccagcgctttacgcgtttatctgaccagaaccaggctatgccggtttccagcaggcccataccgagggattcgaagttaccgataattttacgttcgcgctgcgcttcatccatctccgggaagcacagttcaagattgcggcgggggatcggcacgcggcgtttcaagaagcgcatagaggtgcggcccatccacccgccgagcttgtgcagcacgggatagggcagttgaaccagcaggaacagtatcgccaggccaaaccaggtcagccagtagcgtgggtgcagtaacgcaagtttaaaagtttgtggacgcttcatatcaactctgtatgcgaaatggggtagaaacctgtagcgcataaagaagcgactcaatagcgataccatactctgacacccagtcatgacgatcgtttagccgttgactaaacctttacattcgaagggcggttcgcactgctatcagacttcggaaggacggctgcttgccagcgaaggggctctcgtatttgcgattataccacacaaaacgtgggtgtgagagtgggtgggggattcgtctacaaagggttatccgagggctatttgggtatttcctgttagttatgttgattctttgtttatatgaggtatgtccttctatactggaaggaaatggttcctttctttgcatacaaggatggttgatttgaaaaagcttttcatctcggcggcgttaaccggttttttcgccagtcaccctagctacgccgcagacagttacctggtttataacacgaataatgttgccgtcttccaggtacgcttctttgatgtgggtgatggcccttttatgccgaactatccgcagccaattgagtcgacctgggatctgaatcaccaacagaaagaaaaaatactggatgccatgcggtactgggctgaagttattacccccagacccgatcaattgccagccatcatcaacgtaggcacttttaatgaggtgaatgctgcaggctccagcgaatcggtaaccgatggtgtaatcagcattacacaactgcagggggctttgaacggtattgataccggcgagctaaccttcggttctcatggccaatttatcatgggaaaaatggattttgataatattccctatgttccagcgcaattaccccgctccggaaaaacggatctggtcagtgttgccgttcatgaatttgctcatgggttgggtatctctaatatggccaccgattgggctggggaggggacatttaccccagcttttgacgccgatcagccttttggttcctggactgagcatctgcgtgatgacaatggaaatccggcacgtcccggccaggtcatactgtgcaaagggtgcaataacgcatgggatccgcaaggttttgatgtgcgccttgataaggggtatttcgcgggtaagcacgtggatgaagtgctggcgggcgccatgcccggcgttccggtgaaaatgttggctgatgatggctcggttgacgataactatatgagccatatcgagctgaaaaacagcatgatgagccaccagaattaccgcaactacaccacgtttatggaagccgagttggcgttattgcaggacatggattatcagatcgaccggcgtaatttcttcggtttttcgctctacggtgatgggcagacgctggttaatcgacagggttactttttacgtaacaagcagggcgatggctacatcacggggcagtataataccgcgacattgggcgttggtttgcatgtttacggcagcaataaccacatcttccagcaagcggatctgttaacactgggcgccggtggagcaggtattcgtatcgatgggcaaaacaacacgctgaacgttgagcctggcactcgcgtctacgctgacggggtcaatggccgcggcgtgatgtttgcttatggcaagaaccacaatctcattcagcgtggcgatgttcaagcgctaggcgctaatggcgttgctctcagttttgattttggcaataacctgctgggcaacgatgtggattaccggggatcctggatacattatgttggtggacaggttgcaatattattgccggagctacagggggcgctggtcaataatgcggatattagcggccaggttgccgctaaaggtgcggcgatttatatctcgccaaacgcgctggtcaacaatatcaatctattaaatggtgctcagctggaagggaatatctactcggattttaaccagttggatgagcatggccagcagcgcctgacccagtttacctttgggcgcctggccaatttgcaagggcaggcaaccgatcaggcagaccccaaattccggttcaactatcggggaaatattgaaggtatcgacaatctggcgctgagcactcgcggggggatcacttcgcttaatggtcaccaccagatttacagcatgtctatcgcaccaggctccacgctggctggcaacagcgattataccttgaacccggcgggccgctttgtgaatgacggtatcctcgcgccggggaattcgctagggcaaatcgaggtcaccggcctctatcaacagggcgagaaggggcagttgctgttagaggtcgatggccgtggtggacacgataccctggtggttaatggccatgctgcattcaacggtcagctaacgtttgcgcctcagccagactggtatgccacagactggcggctggattcgggcgagatgctgaaagccacctcgcatagcggagaattcagcacagtggacgggttactcagttcgcctacgctggccttgcaggcaacgccgcagggtgaggatcgttggcaactcgcgatgttgcgtgcagacaacgcctacagccagtatgcccaggacagcaatgcgcggcaggttggccaggcgctggaccacattgtgtctggcgcgggtgcagacatccagccgttgtaccgcacattggacttctctgctgtcgacggacggagcatcagcagcgctttgcagcaactttcgcccgcagcctacagtgcgatgttcgccagttctcttaatcgcgaacaacagattacgcggatcgtcagcggatctcatcccaccacgccagagcagcaggttgcaggcgaatggcatagttttgccataccctttggtggcggtttttggcagcagcgccaaggcgatcgggttggctatgatgccagcagctacggcatagtctttggtgctgaaaagcacagtgagcagaatagcgactgggtttatggcttccatggtgcggtcagtgggcaatcggtaacggtcaaatcaccggaaaacgccaccggtaaaaccacggctttcgatctgggcatccaggctcgttatgccgccgatcggcaagcggggatgtatttattcggtaatggccggtttggcattgaagatagccgcttggatcgcagcatcagcgtcgagacttatcaggcgagccaacatgccagttggaccggcctggcgggttctgtcgctgctggtggcggctaccgctgggcgctgaatgaccaatggagcgctggcccggtggccgcactgaattacacgaccctgcatcgcccaagcgtgacggaaacgggcaacgacagtagccgcctggcgctaggttctagcacttttgattctctgcgctccagcattggggtcaacagcagttgggatcttccgctctcttcgggcgctgctattgctgccgatctgcaacttacctgggatcatgagttgctggatagcgacgtatcgcaagaagcctctttcgccaactaccgcacggcgagcttcagcaacaagaatcaggtgactgggcgtgactccatgggggtgaaagccggagttcgttaccaaatcaatagggatgtggagctgggcttgggggtagagagcgatctgttccgttctggttatgactcggtcgcgggtaacctatcggccacctggcgtttctgacaggccggaatgataaaagaaaaaggcgcttgacccatgaggtaaaagcgccttttttcaacagcttgactgactagtatcagttcatgccgtattttttcaatttcttacgcagtgtaccgcggttgatccccatcatcagggcagcgcgggtttggttgccacgggtgtactgcatcaccatgtccaacagtggctgttcaacttcagccagtaccagctcatacagatcgttaacgtcttgaccgttcagttgagcaaaatagttcttcagtgcttgcttaaccgagtcacgcagaggcttttgagtcacttggtcctgtgagttcacggttgaaacggtcagtacgtcagaatttacgcgttgttcgaacatagttctgtcagctcttttttgttacgcaagattttcgaaatatgcctccaacgcctccagctgttcgctggcatcctctatggcgttgaatgtgcgccgaaactggtcattaggggcatgctcctgtaagtaccaagagacgtgctttcgagcaatccggaatcccttgccttggccgtaaaagccgtgcaattcccgaatatgccctattaacaagcgcttcacttcgccaagtggcatcggtggcagcagctccccagtgtccagataatgctggatttcccggaagatccagggtctcccctgagcagcacggcctatcatcagggcatcagccccagtgtagtcgagcactgctctggctttatgcgggtcagtaatgtcgccattcgcgataatcggaatggaaacattctgcttaactgcccgaatgctgtcgtactccgcgttgccgttgaacaggcaggcacgggttcggccatgaatcgtcagggcctgtataccacaatcttcggccagttgggcaatttctacacagttacggttctctggttcccagccggttcggatcttaagtgttaccggcacatccaccgcgttaaccaccgcgaggaggatctgtctaaccagatccgggtactgcagtaacgcagaccctgcaagcttccggttcactttcttggctgggcaccccatattgatgtcgatgatctgtgcaccgctggccacattaatgcgcgccgcggcggccatatcatcaggatcacatccggctatttgcacggaacggatccctggttcatcgctatgtaccatacgcagacgtgacttatccgtgcgccacacctccgggttggaggagagcatttcggatacagccatcccagcacccattgcatgacataaggttctgaatgggcgatctgtgatgccggccatcggggccgcaatcaggcaatttgttaactggtggtgtccaatgcgcatagacaaagactgaccatactgtgtccgcaagggcgcgtatattacgcattttttcattcagatgaaaggccaaactttgaccaatcgacagttattgggcaataaaagtgcgcttatgcacccttgatgaaaatattatgtttatttaacaatatgttgtgtgattgtgcttaatttttgtgcgctaaaatattccactaacgacaggattttatctttacgtgccggtaataacagatcgtaacatcaggttatttgtaacattctcagcttaatactttgacaaatcggcaagaatggtgctgggaattaccgccaccccagtgagggcagcggcagttggcgctggcaaaaatcaatcgacgatgacgcggccgttcagcggctgtaccgggcgattgttgttatggtggactaccgagtggaattgactgatttgttcggcagaagcgcttacaggctgatctagcaccaaccagctgaccccttcggagcagggtggcgtcgtcagtgaaccgctgaagcggtagaagttaaactgtttcggcagcagcgctttgatatccagcggtttgttcagcacggcggtctgatcgacagcggtaggcatttgttgccaggcctgcgccagttgcggattggctttaccttgctggaacatcagggccagcaccgccagggcaccgtctttgtctttgtagacaaagtgtgcttccagggggaactgcttgccgtcgatctcgttttcactcggggcgtggaaatggaactgctgtagcgtgaaggtgtcgttgtccaagcgcagggtgttgccttcgctgacgttgacttgaatggtatgcccgttgttgacgatttgttgtttgccctgctggaaagccagctcaagcttgccgtgctgggttttcagcgcgccctgaatgttgaccggggactggtttttaccggtttcacacagtgaaaaatcgggtgaaagcttaccccaatgcgccgggtcttcctggccttcatagccccaatgagcatgttctgcggcaccgatcgagaagctggcggccaacagggcagccagcaacatttttcctttcatttcctaatccttgtccaatgaaaataccaattatcctgggtgggcggctcgtatgctgcgggccaccttcactacgagcaggagaatacgcccagcaagtgtcgggataaactggcggattcttaggaaaagaaaaaaccatcggaactgtttaaatttccgatggtttttggcaagcagggaaaatgtaactagttgcgttggccggtgatgcggcaccattcttcacgctcggccaccgggtcgagattgaatttatcctgataggcttcggctacgctggcggcttgagttgccagtacgcctgacaggcccagatagccgccggattttggcaggtcgctgattaacggtgccagttcacgcagcgggccagcgagaatgttcgccaccaccacatcggccagcagatcggctggctggtcttttggcagatacagctcaagacgctctgaaacgccgttacgctgcgcgttgtcacggctggcctgaatggcctggggatcgatgtcgatgccaatggcgcgggcggcaccgagttttaacgcggcaatcgccaggatgccggagccacagccgaagtcgatgacggttttgccagccagatccaatccatccagccattgcaggcaaagcgcggtggtcgggtgtgtgccggtgccaaacgccaggcctgggtctagcatgacgttcaccgcgtccggatcgggcacgtcacgccagcttgggcaaatccacaggcgctcgccaaaacgcatcgggtggaagttatccatccactcacgttcccagtctttatcttccaactgctcgattttgtggcggaaaccgctgcccaacagcggatgctgttcaagtatggcgaccacttcggccatatcggtttcggcatcatacaggccaatcacatcggtatctccccacagcagggtttcgcccggcagcggttcaaataccgggttgtcgtgggtgtcctggaaggtgaccgatactgcgccgctttcaaccaacgcatcgctcaggtcttctgcctggctgccggtggtgttcagttttaattggatccaaggcataacaattctctcaagagggtaaggacgacggcaactggcgcttttcgccgtagacgttaccgagataaaacgccaacaggctgagtaacagcgaaggcacaatagggtgcaatccggccagttgcaggccgaagctggctaatagcgtatagcataacgcaccggtgaccattgagctaagggctccctgcgcgttggcgcgttcccagtacaggcccagcaccagcggccagaggaataccgcttccaacccgccgaacgccagcaggttcagccagatgatcatttcaggcgggcgccaggcggccagcagcaccagtaatccgaggatcagcgtggtcaggctggaaaagcgtttgatcatcttctcattgttcatctgcagcggacgcacgcccagatagaggtctttgatgatggtggcagaggattgcagcaactgcgcattgatggtcgacatgatagccgccatcggtgcggccaggaaggtccctgcggcgtaagggggcagcacggtgatcatcaacgtcgggatcacctgatcggggatcttcagatccggcagcaccgcacggcccagggcgccagccagatgcataccaaacatcagaatagccaccacgatagtgccgaggataatgccacggtgcacggctttgctgtctttatatgagatacagcgcacggcggtgtgcggcaggccaatcacgccaaagcacaccaggatccagaacgaagccataaacggcaggctgaggatctgatcgccgccttgcggtgaaaccaacgccggatcgatctgttgcagcttatcgaccgcgctatgcaagccgcccgccgcgtggatcaccgcaaccagcagtaatatcgtgcctatcagcatcaccagcccctgcatggcatcgttcagcacgctggcacggaagccgccaaacgcggtgtacaacgcaatactgataccaaatatcagtaggccggtgtcgtaaggaatgcccgcagcggtctcgagcaggcgtgcgccgccgataaactgaaccgtcattgccccaaggaaggccaccaacaggctcaggctggccagccataccagcaagcggctcttatagcgggcgaacagcatgtcgttaagggtaatggcattgtagcgccgcgccagaatggcaaactttttccctagcacgccaagtgaaagccacacggcgggcagttggatcatcgccagcagcacccagccgaggccgtatttataggcggctcccggcccaccgataaacgagctggcgctgatataggtggcggtcagcgtcatggccaacacaaagccacccatcgaacggttaccgaggaaatattcactcaggaagttaccgctttggcgacgggtataggcatacaccgagaggccaaataccagcaacagataggcgatcagcggcagaatgacctcagtttgcatcgctatcctccagggggatatcgcggaagatgccgcgtaccatcagccagcacaggccaataaacagcagtggtaccagcaggcaggccatttcgaaccagtgtggcaacccggtgatcccggcgttgctgtctggcagataggccgccagcgaccaggccagcaggtaaagcagcgtcaggcccagtgcccagcgtgcttcgcggttagcttgaacaaagcgttgttccatccgtgcctccaaggggtttacggttatggattggcaaaggaggggattttacgacaagggacggttttgccaagccgttatgttggcaatcgggataaaaaaccggccaaaggctggccggttgatgggctttacgcctgttgtgcaataaaatgctcaatctgcgccaggctggatagcccttccatcggccccttatgggaaaccgccagggcaccgctggcattggcatactgcaacgctttttctgcgctgaagccggacaggaacaggctgacaaaggtcgcgccaaagcagtcgcctgctccggtcggatcgaccattttgctgttatagcctggagtgtgtagctcctgcgtctggccgttttgttgctggtaatggctggcccctttttggccgcgcttgatcacgatgtggctcacgccgctggccaacagttcctgcacgatatccgcttcctgttggtttttgctgctggcaaagtgatgcacttctccctcgctcggcaggaagatatcggtatattcgaggatgtaatcgaaggcctggctcatctccgggatattgagcatctctttgcgaatgttgggatcgaacgacaccgtccccttattggccttgacgatctggatcgcccggcgcatggcatcgatgatgcggaatgagaacagcgaagaacccataatgtggaaatgctggcactggttcagcaagcccagatcgatatggtcggcggtaaagaagccgcaggcgctgttggggatattgaagataaaatcgcgttccagcgggttgcgatagctgacaaatgccgtgccggtcggggccttgtcgatcacgctgatgccgtcggtgatcaccccttccagacgcaggcgctcgatattcaggcggccaaaatcgtcgttgcccacgcagccaaacagcgtggagccaaagccaagccgcgccacctgagcggcatagatagccggtgccccgctggggaacggcccaagaaactcgcctggctgagtgaatccctgattataattttttgaaaggaattcaaccagtaactcacccatcgtgcagatgctaactgacataagtgcccctttattccccgatcgtttcccggttggcccaggtaaaacattcgttattggtgtagcggatgctgaagtcggattcgaataattgctgctgataatgttcattcacgccacggttggtcaccagattgtccacctggctgaggtggccgatagtcccgatcgcactggcctgaatgggcaaatgggtaatgatggcggttttattctgcgccttgtccaggcagcgttggtaatgggacgccaacagcggctgatcgatattcaggatgccggagctgtccgtaatgctggcctcgagaatgcagtggttgatggtgaactgttggatcacgctatccaacgctttaccgctcagcgcggtatgcgagcggatcaactccccacccgcgacgataatctcaccgtccaaaaactgatcggccaggatcgcatgctgtaagtcattgacgatcagccgcagctttttcaggccgctcaggaacgggatgatcttgcggcagatatcgccatggccgagaaatagcgtatcgcgatcggcaatcatcctggcgcagtggcgggcgatttccaactggttagccagcgtgagtgggggcagggcgatccctggttcggtcggctccgccagcggctgcgttggggttgcaatggcaccgccaaaggatcgcttgaggtagccttgctgttccaggtagctgagatcgccacggatcgtcacgccggaaacccctaactgggcagaaagatcgtcgaccttgatctccccttgctggccgacgatttcagcaattttcaatctgcgtttcagcaggttagatgactttctgggcacattcgcccccatcgttaaacggtaataagggctactatatccttcatactttctaattgaaagtaataccctcgcaggcattcgttattttgaaagtcaggattgggcgagtgcttaggtttatatttttattattattcatgttattaggtgatattcgtgggaggggatacacccgagatagggtaatcttaagcgcacaaacaccggaacacaccttatgtttcgtaatcaacatctagttatattacgttttgaaagttatttgataatcttcgatccctgtcacgcttttttgcgcgttttctctctatattcggtttcacttggaaagtttatctaactaaattttcattttgtaattaccgactgcggtatcaggtgcgggatcgaggagaatcgatgtacatcatttcaagcaagaatatgctgcagaaagcgcagcagcaagggtacgcggtgccagcattcaacatccacaacctggaaaccttgcaggtggtggtcgaaaccgctgcacagtatcgttcgccagtgatcctggcgggaacgaccggcacttaccgctacggtgggctggaaaacatcatcatgatcgtcaaggcactggcgcatgagtatcagatcccgctggcgttgcatttggatcatcacgaagagcccgccgatatctaccataagatcaacgccgggatccgttccgtgatgatcgacggctctcactttccttttgaagaaaacgtggcgctggtcaaacaaatcgttgaatacagccaccgctacgatgccagcgttgaggctgagctaggccgcctgggaggccaggaagacgacctgatcgtggaagggaaagacgctatctacacctcgccggaggcggcggtggagtttgttgcccgtaccgggatcgattcgctggcggtggctattggtaccgcgcatggtctgtaccagtccgagcccaagctggatttttcccgcctggaacagatccgcgatcgtgtggaagtgccgctggtgctgcacggggcttccggcctgagcgatagcgatatccgccgctgtatccgtttaggcatctgcaaggtcaacgtggctaccgagctgaaaatcgctttttcggatgccctgaaagaatatttccaccagcatccggatgccaatgacccgcgccactatatgcagccagcgaaaagcgctatgcaacgggtagtggaaaaagtgattggcgtgtgcggctgcgagggccaattataactattaacgcgtaacacccctacaaaacagcaagctaaacaagcagaaataataaaaactgaggatagatcatgcataaattaaaggtattaggttcggtgctggccatcggcctggcagtattctcgcaggcaacgttcgccaaggaatataaaattggtgcatcgctgctgacgcaacagcatccgttctatattgatctggccgacgcaatgaaagcggaagccaagaaagacgacgtggtgctgaatatttcgattgccaatcaggatctgaataaacaactctctgacgtagaagactttattaccaagaaggttgacgccattattatttcgccggtggattccaaaggcgtgcaggcggcgattatcaaagcggagaaagccggtattccggttattaccgttgatgtggccgccgaaggcgtgccggtggtcactcacgtggcgaccgacaactacgccggtggcgtcgaagcgggcaagctgatgggcaaactgctcaacggcaaaggcaaggtagcgattatcgattatccggcgctgcaatcggtggtggcacgcgtggacggcttcaagaaagggctggccgatacgcctgacgtgaagatcgtggcgatccaaaccggcatcactcgggcggaagcgttaaccgtggcgcagaacatgatgcaggcgcacccggatctgaatggcctgtttggttttggcgatgatgctgcgctggctgcggtgatcgccgccaaatccgcgcgtaacgacaatatcaagatcatcggtttcgacgggatgaaagaggctcgcgacgccgtcgacagcgacaagacctttgtggccgttatccgccaatatccagaccaaatgggcgccaaggctattgatgctgccgttgaccatctgaacggcaagcccgtcgccaagttgattccagttgcaccaggtgtttataccggtaaataacactgctcgttatcccaagcttcagtggctaacccttaccccaaccctctcccaaagggagagggagttggtcggagtgcttgattggtccgcgctgcttcgggaagtgagtagtaagaagcaagaggactgggtattacacagagaaaccaacgaactcgatcggtccactctccctttgggaaagggctggggtgagaggccacgtgggtggaggaaataatgacggatacggtgctggcggtaacggaaatagccaaaagtttcggccatgttaacgcattaaaaaatgtcagcctgaaaatacgcaaaggtaaagtccatacgctactgggtgaaaatggtgccggcaaatctacgctaatgaaaatcctggcagggatttatccgccgaccaaaggggaaatactcctcaaagggcaaaacgtcactattaacaacccgcagcattccagaaagttgggtatcgcgattatttttcaggaactgagcctgagcaataatatgagcgtagcagaaaatatctacgctaataatgagccaacccgctttggttttattaacgatagccagatggtgaatgattgccaacgcctgctggcggacttggccattccgctcgatccacagcaaattgtcggcaccatgtcgatggcccagcgccaactggtagagattgccaaggcgctgagctacccagcagatgtcgtgatcatggatgaaccaacgtcgtcgctgagcgataacgaggccgacatcctgtttggcatcatcgacaagctgaaacagcgcggctgcgcggtgatttatatctcgcaccgcatggatgagatcatgcgggtatctgatgatatctcggtgctgcgcgacggcgagttcattgccacccatgataaacaccagaccgatattcaccggctgattgcccagatggttggccggaaaatgaccaatatctccccgccacgcatcggcgaacctccttcagcagagcaagtaccggtgctggaagtcaggcaattttcgcaggacaaactgtttcacgatatccatttctcactgagtgcaggtgaagtgctgggcttttttgggctggtgggatcggggcgttcagacgtaatgaaggccatttttggcctgaccggctatcagggtgaaattcgcattgatgaggcggtagtcactattcgcaatccaaagcaggcgatagagcatggtatcgccttcgtgacggaaaatcgcaaggaggaggggttggtgctgatgcatgacgtaagcatgaacacccatcacgtcgcctttcagtatgcgggctccagcctgatcaaccataagcacgaagaggcgaaaacccagcaggcgatccggcggatgaacatcaaggttagttcgccccaccaactggtcagtaccctgagcggcggcaatcagcaaaagattgtgctgtcgaaatggttggaaaaagtgccacggatcttaatcctcgacgagccaacgcgcggcgtggatgtcggtgccaagttcgagatctacaacgtcatacgccagcttgctgcgcagggcactgccattatcttgatctcttccgaactgccggaagtcatggcgctcagcgatcggctggtggtgatgcgcgccaagcagatcgccgacgtttttgccaccgctggactcacgcaaacccaggtcatgaccgcagcaacaggagtgaaataatgagcgataaagtgctggccgccgagggccattcggcgttcaacgggccagggaaactggcaaaagccgccaagcagtacggcggcatactggcgggcctggtggccttggtgatcctgttcagcgtgatcaacgacagcttcctgagcgtgaataatattaccaatattattttgcaggtctcgatcattgccattaccgcctatggcatgacttacgtgctgttgctgggggatatcgatctttcggtggggtcaaccattgcgctggtggggacctttgctgcgcttggtctgtcgtttggcattccgtttattctggtgatcccgctgtcgattatggccgcgctggtgctgggcctggttaacggtagcctgactgcgctggccggtatcccgtcgtttatcgttaccgtcgcgacgatgggcatcttccggggcattgcctatatcgtcaccgacggcacaccgatcatgatcaaaaacgaggcgtttctggcgctgggcaacggcgagttcctttatatcccgatcccaatctggatcctgttggtgttgctgatcgtcaaccatttcatcctgtcgaaaaccacctttggccgcaaaatttatatcaccggcggtaacaaagaagctgcgatctattcggggattaacgtttccgcgctgaaaataaaggtctttatgatcaccgccgtgatggcgggcatcagcggcatgatcctggcttcacggctgtattccggccagcctaatgccgcgttgagctatgagctggacgcgatcgccgccgcggtgttggggggcaccagcctgaatggcggctacggcacggtgatcggcaccatgattggtgccctgaccattggggtcatcaacaacggtatgaatttaatgaacgtgccttatttctatcaaatggtggtgaagggactggtgatccttatcgcggtgtatgtcgacgtcagaaacaagaagaaacgcggctaacgatcacaggcagatttgtataaggaacgggacaatgagaaaaatttataccatcggcgagatcctggttgagatcatggccgataaggttggccaatcttttacccatccaggcttatggaatggccctttccccagcggtgccccggcgatttttatcgaccaggtgaccaagctgggcgggcagtgcggcattatcagctgcgtgggtaatgacggcttcggcacgctgaatatcgaacgcctaaaggctgacggagtggatacgcgcggtatccgtgtgttgccgcatgagacgaccggcagcgccttcgtcacttaccactccaacggcgatcgcgattttattttcaatatcaagaacgcagcctgtgggaaattatcggccgagcatgtgaacgccgaactgctgcaggactgccagcactttcacatcatgggctcatcgctgttttccttccatatggtggacgcggtgaagaaggcggcagggatcgtcaaagcgaacggcggcaccttgtctttcgacccgaatatccgcaaggaaatgctcaatatccccgagatgcgtgatgcgctgcattacgtgctggagctgaccgatatctatatgccgagcgaaggcgaagtgatgctgctgtcctcccaaaccacgctggatgaggcgattgctcgctacctgaaggacggcattaaagaagtggtggtgaaacgcggcagtaaaggggcgagctattattccgtggatgaaaccctgcatatcgacagctataccgtagacgaggtcgatccgaccggggcgggcgactgctttggcggcgcttacattgcttgccggttacaggggcacagcgtttcccaggcgctgcgctatgccaatgcctgcggtgcactggcggtaacccggcgtgggccaatggaagggacctctaccttcgctgaaatcgacactttcttgcagcagcaacggaccgtgccggtcggcgcgctgtaaataacattccaacgtcttgaatattcagttcaggacattgctttaccctatgaatttcaagtcacagctaggcgacaagcttgttcatccccaggagctttcttttagaaagtggctggggggggcaagtgcaggtaacaaggctgtgacttgaaaggcgacgggtaaatgaggccataagtatgaaatctattatccagcagcataaaagcggcaagcatattggtatctgttcggtttgctcggcacatccgttggtgattgaggccacgttgcgttttgacctggctagccagcgtaaggtattgattgaggccacctccaaccaggtgaaccaatttggcggctacaccgggatgaaaccggcggatttccgcgagtttgtgtatgccattgccgccaagattggcttcccgcagtcacggttgatattggggggtgaccatcttgggccgaactgttggcaggatgaaccggctgggctggcgatggagaaagccgaacgcctgattgccgattacgttcaggctgggttcagtaaaattcatctggatgcttccatgtcctgcgcggacgatccggttcctttaccgccaacggtggtggccgagcgtgcggcgcggctatgtgcggtggcggaagcggctgccacctcagagcagcggcaggcgctgagctacgtgataggtacggaagtgccggttccgggtggggaaagccacgctatcgctcaggtacacgtcacgcggccacaggatgccgccaagaccatcgagacgcatcggcaggcgtttgctcgcttaggtttggagcaggccatggagcgggtggtggggctggtggtgcagccgggagtcgagttcgaccattccacggtgatccactatcagccggaacaggcacgcgagctttccgccatgattgagtcaacgccgttggtgtttgaagcccactctacggattatcaaaccccgaaagcgttccgccagttggtgcgcgatcactttgcgatcctgaaagtcggcccggcgctgacctttgccctgcgtgaagcgatcttcagcctggcgctgatagagaaggagctgattgccgcagaacagcagagccacgtgctggcggtgatcgacagcgtgatgcaggatgagcccaagtattggaagaagtattacgatccgcgtcattcgaaggcgatgatcgatctgcactacagcctgtccgatcggatccgctattactggcctgaagcgcgcatcagcgcggccatcgacaagctggtggcaaacctgagcggagtagccattccgttgggtatgctgagccagtatttcccgctgcaattcccacgcctgatggctggcgagtgtgccggtgacccacttagcctgattatcgacaagatccaggaggttttgcgggcgtatgcttatgggtgcgatacccc

SEQ ID NO: 311 - DNA, 26023 bp, unknown
  Altogen  635822 strain
  misc_feature (23296)..(23296): n is a, c, g, or t
atagccaatagccccttcggtcagcgtgccttgcagcactgagccggtggcttgggcgttgtccgccagtttgtctacgtcgatacgtacgctgctgcggtaataactgttcacatccgccactaccgctttaccgaagatattggagttgaccgtgttgccataaccgcccactggcacccctgcaacgccatcggtatcaatcagcatccgcgtcccgcccattaacgatgtacgatgcaaagcaccaccttcgcccgtcagggtagctccgcccgacatcgacatccctgccgagctatactgcccagagcggtaactggccatgccattcacctgtgccagggttccacggtgtgagtaatagccgctgatatcagcatcgctattcgccattccagcccggaccgtatagttgtcggtatcaccgacccgatctgaatagttgaccgagttggtattgtctcccgcagcataagacccgttatagcccagcatgccgctgcttccccatggcatggacagcgacagatacatgccgtcatccttggcgttgctgaaattgttgcgataagccgtcagcgacagattgacgttacgaaaacggccaatatcaaaatagcgcgccagcgtcatgtcatagcggtcactggtggcctggttccaataggtctggtggttgtagttaaggtacccactcatcgccagcgactcgaactgctggctgaaagacagggtatacatctccttgctacgcccagggcttaccccattggcgttatccttggcactcaggtagtccgccatcgacataaaaccgctgtcggagaagcggtagccggcaaaggtgacctggctgccggtatcatcaaagcgcttcgagtagctcaggcgataggagcccccctgctgagtgccttgatccggtagcctagcccgggactgtgtcacgtccgcagacaaggccccaaaaatcatcaaatcacgcccaattcccagtgacagggccgagtattcatccccacccacccccccgccgtacagcgaccagccgttactcacgccccaggagaactcacccgtggcaaacatcggcccattgatattatgttgccagtcagatgggcggcctgccgccagcttgaaacgcacctgcccgggtcgtgtcaggtacggaatggtggcggtatccacctggaaacgctgcacgctgccatccgcttcctcaacccgtacatccagtgcgccagagaccgcgctatccagatcctgaatacggaatggcccggatgcgaccaggacttccttgatcacccgcccctgctggctaatcactacctttgcgttgccgcgtgccacaccggtgacttctggcgcataaccacgcaaattcggcggcagcatgttgtcatccgagaccaggctgcccccggtgaaacggaagctgtcgaagatgtcggaattaaggaaatcttcccctagcgtcagcttggcacgcagcggtgtaatagcccggtaggcggtgtactgcgtccagtcaaaactgcgggtattctctttcgccgaatcgctctgatggtcgatcctggtctgccaactggcccgcagccgccaggctcccagattggccccggtcactccgttgccgctgaggttgtacccttgagtaccatcccggttctgccgctgaacctgggtattaaggctgtagtccagcagaatgccagggatcccctcttcccagcgcgacggcggatcccagttcgcactgctgtattccagataagcctgcgggatactgagatacagcgtgttggtaccgagatcggttcgggcctgaagcccatccaggctagccagatccagacactccccctgatgccaccaggtcaaccctgccagtgcggccttggtcagccccaactgctccaccatctctttactcagacagacctggctgcctttcggatcgtcgtccggtgccaagaacgttatcgggcgtgccggttgcacctggttattcaggttcaaagcaagttcataagtgcccggcaggataaaaccctggtgcgaaaactggcctaaatcaatgttgtcacgatctttgagatccaggacatccgtgttgaactggatatcttttgcctgggccacgttcaccgcaccgagcaatacgctgctgcccaggccggcttgacacaagatggcaagcagggagcgggaaaaataacgcgccatgaagagagtccctttagtaataatccattctgaaccgtatagccgaacggtaatcccctgctcgcaacgtctgttggttacccaccaggctcagggtgtaatgcagttgcatttctccctgggtcatggctccggcctgcaaggcatcccccggtgctgctacctcgcctctggcatcacgtatcatcaacgccacgccgcgtgcctctccgctcactccgaagtgaccgcgatcgtcatcaccgtcaaaggtcacctgaaagcgctgccagtcgggggctgtcgcgtcaacacggaccagcacgcaatccaccaggcggatggcaaaatctttttctggcccgcgaccgtcccggatcagttggctgaccgggagggtgtccatcaccagactctggtcacggtccccaacttcaattgcacaaggcgtctcaacaatggcgccttccatgctgacgcgcccctgccccagcacatcagcggaaaatgcactcccggaaaacgccagggcacaacacatcagcagggaaggcaccacacaaggcgaaacgccataagtccatttcattaaccaactccatgggtcgcaaaaaaaacctgcggcagaaccgccgcaggttgttcagcactagacaacgaacttactggtaggacagtacgaagttggttggaacctggaagctacctggtttgatcacagcgtcttcgccaccacctttcagagccgcagtgaagctcagggtgttgttggtaccattaaccacagtccgagctgcggtaggggtgttcaaagccactttggcaccgtcagcctgagacatcagaatataagcaccttcagcagtaccgatcagacccagactggtagcatcatatgaagaagccgtaccggtgaaggtcacagagactttatctttggtgcctgcagtagcaatgacgcaatctttcagctcaatgctgaaagcttctggcgtagagacaccggtattattgttagctgccagagcaacgttggacacggcacccaatgggataacctgatccagtgaacctgcagcgatagagcaaggtgcatcagtgatagaaccggtaaaggtgatcttgccttcgccttggttagctgcgtaagccgtgctagccaccagggaagcgccaatgatcattgcaattgctttaactttcatgaaatccgttcctatgatttatatattaactaaaatgttaggcggactgtgaaatacactgccacgccttttatcactacccaacaatatttccgttgcttaggattggcgctataataccgtcataggaaaatacttatataggacattcctctttgttttttcttgctgtcttataaaaaaaaccacctcagtgagcaactcagcaagtatatgtatatactaggaaatatcttaataatgcgttttaaataagcatttattgctagtgaaaaaagcaaaaaaatgtctattttcagaatttctttatcactattatcggcatgaaatacattgacgaactattttttacatttgtgtaacttcccgttgcgggttgagcgttctcccctcccccgcattccgacatgccacaagcggggaacaatatcggttataatacaagattgtgagattgcggcgctgtactgtagcccggcagcagagtaggctggtttaatgaggcagagtcaggtcttaacctacagaggtggacatggtttttacgatttttaacatgattgcgttcaggagcgaagacggggcgatgtggaacattgcacagcccgacagaaggctctccttcactaccattcctacccggttgttcacctacctgttggaaaacgccgataaaatggtaagccgggaagaattactcaataatatctggaataaatacggtctggaaccttcgaataactcggtgaatcagtatatttcgctgatccgtaagtcattgagtgagttaggttgtgacgaagagatcattaaaaccattcctcgagtcggcttttatattgcccgggagatggtgtctgccagttcggagacaccgcacaacgtcgaaaccacaagcaccaaagttcagcctgcaatagagcaatcaaggctacgcggagtgtataaacccgcgttgctcgccatcagcttgattatctcaaccttattggttctgcagcccttccgctccgctactggccacctggattaccgttttccgaagtctacgctgtataaaattggcaatatagcgacctgccctgtctatgcgcttagcgctagctcacctgacgtcgctgcacgcaaggaaaaattggccgaagagttggctgctgcgcatgctccgtgcatcaacaatgagatatttatttttcactcaggcgaacactatgcctaccaacggtccggcagagcattcataacccgttgcaccaatagtgatcacaccctgtctcatttctctgactgtaaggccgtctatgctttcgctaaataatcgctcaggcaggttcatcgggttggttgctctcgccttggtcgctgtagccttgctattcaacctcctgatgcataaatttttcattaccgagaaaggcccaaaagtgagctgtgccgcctttttcctggtacaaagcgacttgcaaacccagggcgtcatgagtttacatattgatggtgtaagccatgggagaatgcatatctcagctacggtcaaggatagcgttggcgcagtaaagtataatctgctgcgcaatgtcaattttgaatatcgttatgaaggtgatggtcacctcgccttgcaactggtggatgtcaataaaaatgccagcgatactatgccgaatgagttgtttaaccagtccatttttgatttttcggtgaaagcccggcaactgaggatcaccgaagtgggtgatggctacttattgtggaatgacttttcgccagtgatgatgtgcatccacaatcaataacaggccagtttatgactgaacagtaaagcgctctctcttcccactctgcgaatgcgatggctgaaggatggcatccagcgccatcgcacgggtatttcgcggtttattgcacatgagtattaccgaacttaagcatatacaattcattgaagtttcttgccccgtgtcgttttaccgccttggccttataaccactgaccgtttttatcgacagatgcagcatcttggctatctgtgattgcgagtacccctccactaagagctttactactcggtgctctttctgcgacgacttcaagacttccccccaaatatcgccaaagatattgtccgctaccgtcttgggttgcgctgagttcaaagctcggaccaggtttttcagatcggcataggcgatttttttatcaactataaagtcggataaatgcttaagtattacagaacactctttacctttggaaagcagcgtgatcacataaatcgttttgctttcctttttaaggccataaatctgttttatggtgctgtatatatcggttgagtctccatcaacaaaagcaacgtaactttcatcatgatgcaagcttgaatttggctcagagtttaaggactcgacaattgaatcgaaggcaaccttatttaaagggcaagggtaattcgtgtcaaacaaatacatggataacttcctgaaagaataatacttgaatttggtgaagcaccaggcctaaggctattcaagataaccttgttcattgttaatcgacgtcagaggcctaaccccttaagggttttgactgatatctacctggtgttgaacttatcgttactgctcaggattgacgttgtgcctgccaggcctaaacccggcaaactgcaccccacatcaatctgagcctcaagttacaggaaaagttatcacgcagttatttataactgcaattacgttatttatagatttaaattctaaattttagatttattgatggagttatagggatttaacaccacacaaccgcagtggaattcagcagcaagtcatcctattgcttaacctcaacaccaagaatgctgtctatcaggtgatatcaagcattattccttagctttagcatgtagagctcattgaagtttcttgccccatgtctttttatcgccttaaccttatagccgctgatggtttttatcgataagtttaacattttggctatttggtattggctgtggccatccaacaacagcttcaacaccagatactctttctgagaagacttcaaaatgtccccccagatatcgccaaaaacattatccgctaacgccttggggcttgccgtaaccatggttctgatcagccgttgcagatcgtcataggtgatttttttgtccaccacgtaatcagatagatgtctgatcaccgaggaacaatctttatcttttgacagcaacgtgaccatataaacaacttcgctgttcttgcgtaactcgtaaaccgacttgacgacgctgtagatattagccgagtccccatcaacaaaagcgatagaaccctcgccataacgccaggcaggggttggctcacatctcaaggaatcgatgagcgatttaaaggttactttacttaatgagcaggaataatctgagtctattagaatcattggaatacttacctcctggtaaaaataatccatccatattggaacgcacagcattcaggagcaccaatgactggcgacccaatattgtctttaatatatatccaggttctaataccataggcagagcaagccaaaattaatttccggctctttgatttatgcaaaaaactctcttatcacctggataaagtcatgacattcctttacacccagccttatcagtatattcttataaaattattatcgtcaatcacttttattgcttacaataaccatcaagcatcataaaaaacattccttatattttataatcgcttatagatagatttattcaagaacataatcaattataagacaaaaagaaaaaacaaagagaaaactcccatttaaatccgctatgaacggcaatacaataacgcatgacattcaacacaacccagcaaatcaattattaatcaggatatccaaccccaatcaaagcttattgttacgctttgatttttatattgataagtagagctctttcgcgcgtaaatggccgttcatcgggacaggtagatatcaaaacccaccaatcatcaaaaaagaagcgctgaccaaaagataccgccgccaaacagtcatacaggatatagggtggggctggagggtctttcatacctgcaaggaggcgctatgataaagcgcactttctccattttcatcgcccagcacgaccgctattttgctcatggctttgcgtcggactaaacgcattctactactgacaagagatatccctacgctggttgacagcgatactatcccaacgaccgggttagtggctataaaccgcagtattggaaaatagctaaccattgtgcttcatgctctcttctctaatgcagcagcttgcttctttcagccccctttccttaccgtttaacctcatcgatgtaacctattcagtctattacaagagcagtttgcgtaatgcttccaatttttggctgtgacagcctattgcctactgggctagtatagcggctgaaaaagatcctgatgcttgcggtacgtaaacctaggatcttgccgagtttggcgtggcttttatccgccaatctcgtcattgtgctggctttgagtgacaaaggtttgccagcctgtttgccggtcatatatgctcaatcccttgaccaaccgattgatttatttgagcagcgcttgctgttgctcatcctgaacgttttggcggtttttaatgaggcgacgtgatacccaatgacgacaacgaatatcacaatcaactttgaattcaatggattggaacagtaacgttatgacaagcaccgaaaaactcgattcgcacacccctatgatgcagcaatacctgcgccttaaggcgcagcatccggagatcttgctgttctatcggatgggggatttctacgagctgttctatgacgatgccaaacgagcctctcagttgctggatatctcgctgaccaaacgcggtgcctccgcgggtgaacccatcccaatggcgggcgtacctcaccatgcggtggagaactatcttgccaagctggtacagcttggggaatcggccgcaatctgtgagcagattggcgacccagccaccagcaaaggtccggtagagcgtaaagtggtgcgcatcgttacccctggcaccatcaccgacgaagccctgctgcaagagcgccaggacaacctgctggctgccatctggcaggatggccgtggctttggctatgccacattggatctcagctccggccgcttccgcgttgcccagccagaagatcttgaaaccatggcagccgagctgcaacgtaccaatccggctgagctgctgtacccggaaaacttcgagcaaatggcgctgatcgaacagcgccacggtctgcgccgtcgcccgctgtgggaatttgagctggacaccgcacgccagcagttgaacctgcagttcggcacccgcgatctgaccggctttggcgtcgagcaggcccatcaggcactgcgcgcggcgggctgcctgctgcaatatgtcaaagatacccagcgtacttcgctgccacatatccgtggcctcaccatggagcgccagcaagacggcatcattatggatgcggccacccgccgtaacctggaaatcacccagaacctgtccggcggcggtgaaaataccctggccgccatcctcgatcgtaccgttaccccaatgggtagccgtatgctcaagcgctggttgcatatgcccacccgcgacgtccaggtgctgaacaaccgccagcaggccatcgctgcattgcagccattgagtagtgagttgcagcaacctctgcgtcaggttggcgatctggagcgtattcttgcccgtttggcactgcgcacggctcgaccacgggatctggcacgtatgcgccacgccttccagcagttgccggatatccgcgccctgctggaaaacgctgatgcaccacagatgcaaaagctgttgtcacaggtcggtcaatttgacgagctacaggcactgctggagcgcgctattgtggaatccccaccggtgctggtccgtgatggtggcgtgattgctccgggttataacgaagagctggatgaatggcgggcgctggccgacggtgctaccgactatctggatcgcctggagatccgcgagcgcgagaagctgggcctggatacgctgaaggttggtttcaacggcgtacatggttactacattcaggtcagccgtgggcaaagccacctggtgccgatccactatgtgcgccgccaaacgctgaagaatgcagaacgctacatcattcccgagctgaaagagtatgaagacaaggtgctgacctcaaaagggaaagccttggcgatcgaaaaagggctgtatgacgagctgttcgatctgctgttgccgcatcttgagcaactgcaacagagcgccagtgccttggccgagctggatgtgctagccaacctggcggaacgagctgaaacactgaactacgcctgcccaaccattagtgagcagcccggcattcgcatcgtcgatggccgccacccggtagtggagcaggtgttaaaagaaccttttattgccaacccggtttctctttcaccgcagcgccgtatgctgatcattaccggcccgaatatgggcggtaaaagtacgtatatgcgtcaaacggcgctgattgtgttgctggcgcatatcggcagctatgtaccggcggcgaaagccaccatagggccggtggatcgcatctttacccgtgtgggtgctgcagacgatctggcttctggccgctcaacctttatggtggaaatgaccgagaccgccaatatcttgcataacgccactgagaacagtctggtgttgatggatgagattggccgtggcacctctacctacgacgggctttctctggcctgggcctgcgcggaaaacctcgccagccgtatcaaggcgatgacgctgtttgccacccattactttgagctgaccactctgccagagaaaatggagggtgtggttaacgtgcatctggatgcgctggagcacggtgataccattgcctttatgcatagcgtacaagacggcgctgccagtaagagctatggcttggcggtagcggcactggctggcgtgccgcgtgatgtgatcaaacgtgcgcgccagaagctgcgtgagttggagagcctctccagccagacggcagcgggtacggtagatgccacccagatgacgttgctgaacgacgaggtgtcaccggcggtagaagcgttggagacgttggatccggattctctttcgccacgccaggcgttggagtggatctaccggctaaaaagcttggtgtaaggctgttccattgacttgagcatatgacccctctcccacagggagaggggattgtccgagttcgttatcaattgcagacactggcctaaccacgttactcgtcatctctcttttacggaaaaacagaacgatcaccgtacctgatgacaacaccgtcaatcgcagcaaatcgcaggcataaaaaaacggtgagcgtcatcaacgctcaccgttcttattttatgactataacgcgtttattcgcggaacagtgcctcaatactcaggccctgcatttgcagaatttcacgcaggcggcgtaagccttcaacctggatctgacgaacacgctcacgtgtcaggccaatctcacggccaacatcttccagcgtagccgcttcatagcctaacaggccgaaacggcgagccaacacttcacgctgtttggcgttcaattcgaacagccatttgacgatactctgtttcatatcatcgtcttgcgtggtgtcttcaggcccgttgtctttctcgtcggtcagaatgtccaacagggctttctctgaatccccacctaacggcgtatcgacagaagtgatacgttcgttcaggcgcagcatacggctgacgtcatcaaccggtttgtcgagttgctccgcaatctcttcagcactgggttcatgatccagtttgtgagaaagctcgcgcgcggtgcgcaagtaaacattcagttctttgactatatggatcggcaaacggatagtccgggtttgattcatgatcgcccgttcaatcgtctggcggatccaccaggtcgcataggtggaaaaacggaaaccgcgctctgggtcaaacttttccaccgcacggatcagaccaaggttaccctcttcgatcagatccagcagcgccaggccgcgattgctataacgacgggcaattttcactaccagcctcaggttactttctatcatgcggcggcgggacggcacgtctccgcgcagtgcacgccgcgcaaaataaacttcttcctctgcggttagcagaggggagtaaccgatttcgcccagatagagctgcgtggcatccaatacgcgttgggtaacaccttgagacaacagctcgtcttccgccaagtcattctcgctggtctcttcttctacctgcgctttttcatcgaatgactcagcctccatggcgttctcatcgaaatctgcatcgtcatgtaactcgttaactttcagcgtattttggctcataaagcggctcctacccgtgataccgcgagcagaatacaacgcattctgcccaatctatcgctgcggaagataacgcagcgggtttacggatttccccttgtaacgaatctcgaaatgcaaacgtactgaactggttccggtgcttcccatcgttgctattttctgccccgccttcacttcttgttgttcccggaccagcatggtgtcgttatgggcgtaggcactcaagtaatcatcgttatgtttgatgatgattagattaccgtaaccccgcaaagcgttgcctgcgtacactacacggccatcggcggtagcaacaatcggctgcccacgggaaccagagatatcgatgcctttgttcccaccttccgatgaggagaagttatcgatgatcttaccgtcagttggccatttccaggtgctaactggggcgctgttgctggcggtgctgctcgccggaggcgtagcggctggtgcggtaacaggagctgcggctgagcctgccacaacggctcctgatgcaggtaacattttacctacattcggtttactcgagttatcagaatacgcgttcgttgattgagaatcaaccgttgcagtttgtatctgagtggtagaaggtggttttgacaccgtaccattcccacccgctaacatcccaccgccgccgttggcagaaccgctccccagttgcagggtttggccgacttccaggctgtatggctgtggaatattgttgcgttgggccagatcgcggaaatcgttgccggtgatccaggcaatatagaacaacgtgtcgccacgtttaacggtataggtgctgccaccgttgtagctccctttggggatcgagttatagctacggttgtaaacaatacgcccctgtgatgcattgccgccaccggcgttagccgatgccgcggctccaccaccaccaacgctgctgataggtgccgaagtagaatttttatccgaacaacccactaaccaaacacttaacatcgtacacaccgcaactcggcgtaaagaactcattgggcttcccgtgctcatgcttcccccatgacagcaatatcaaaaaataccttatacatcgtagccgagctttatcgttctacagcacaaggtttccccggccgatccctgaaaaccagaagatcacccaccagggagctaaaaaaccgtggcgccaatgctagccacattggcacgatcacgccataagacaactacatactggaacaattctaatgaaaattaatattattcaacttatttatccgtcatgttgctctgcgtaggctaagccagttcgcccttgaccaagggaacgaatcgcaccgcctcaacggtatcgatggaaaattcaccgccccgccgctgaatgcattgcagtacctgagcctgttcgcctaccggcaacaccaaaattccaccgtcgtccaactgctgcatcaacgcctgcgggatctccggcggcgcggccgtcacgatgatcgcatcaaatggtccacgcgacccccagccctgccaaccgtcgccatggcgggttgagacattgtgcagatcaagctgcttaagacgacgtttggcctgccactgtagccctttgatgcgttcaacggagcagacatgctgcaccatatgcgccaggatcgcggtctgataacccgaaccggtgccaatctccagcacgcgtgagctcggctgcaggttcagcagctcggtcatgcgcgcgaccatataaggctgagaaatcgtctgccccgacccaataggcagggccgtgttctcataggctttatgggctaatgcttcatcaacaaaacgctcacgcggtacgttctcgattgccttgagcagccgttcgtccctgatcccctgctggcgcagctgtgccagcagcgtttgtatgcgtttgttcaccattccccgctaacctctgctttggttaaccattttgatagcacatcttgcgccccgtaggcggtcaaatccacctgcaaaggcgtgaccgacacgtaaccctgctccacggcggcaaaatccgtgtctgggcccgcatcgaatttatcacccggtggcccgatccaatacagcatctggccacgcggatccggttggctaaacaccttatcggcgggatgccggctgccacagcgggtcacacgtatccctttaatttccgccaacggtaaatcagggacattgatatttaggattttaccggtacgcagcggttcttgttgcagcgcgcgcaatatacggcaggtgactaccgccgccgtctcataatgctgatgaccattgagcgacaccgccaacgcgggcagccccagatggcggccttccatcgcagcagccacggtgccggaataaataacgtcatcgccgaggtttggcccggcgttgataccggacaccacgatctccggcgctggcagcatcagttcgttaacgccaaggtagacacagtccgtcggggtgccctgctgcacggcaatatcgccgttgggcaacgtcagagtacgcagcggcgactccagcgtcagcgcattggaggaaccactgcggttacgatcgggggccactacctgcacttcggcgaattcacgtaacgccgccgccagtatctggatacccggggcgctaacgccgtcgtcgttgcttaggagtattctcatattgtcgttaaacaactttcttgctgaaagcgataaaacgagggttgtgccctatttttttacatctatctgtttttaataatattttcaatagtaagcccaacccaccgtgttacccattgtgatttgcgtggtacagcaaggcttgcctcgctgatgctgatagtattagccaaaacagccagctatgcgatctactatacaattcaacggtcatcagtggcaaacggggcaggttagccccctcgacaaagggggctgggatgattacttgaggtgggtcgtgaaattcccagattatggggccgtctgggtggttggtgtgtaaataatgcgcaacttgccggtgtaatcccccgccgttttatccgccattgagaaggctggcgttgtcagggtcaacggggccggcacgcaaagtgccggggcaccgccgccaggtaacaccaccggccgctggatattgcggcgattggtatcgctccagatgacctctttgccgttagcgatctcttgcactgccccggtggtgggattgatcacgctgacctggtagtccagccggtcacgcgccttggctttatcaccgccacggcgatacagtgaaaactgccccttgatgcgatcgggagccgtgtccccttcgtcctgcaacagcaggctgatacggttactggccgagtcgttaccatcgtagaggcacatatccaggccagtactgccgctgacgctcttacccgcgccgactcccggccgggtattcagattcaggttgataaccggtgccgaagtcggaaaagcgggtaggtaaatctgttggttaccataatccgtcacgttaagagccagactcgccttccaggtaacgcggaaaatgcctgggcagccgtaggcagatgcactgcaatcatcccaagctttcacctgcatcttgagttcagcgcgccaaacaccggcatcagatagtttgttcaactcggaggcgggaataaaagtactgaatccctgggaacccacactggtgccggtgatccaggaactaaatttacccgtagctttaatagaggtgaccagtaaatctttggtctttccactgctgtgagtaaagcgcagcgtcagagttttcgaattattattgaaagtactatcccaccaccacaattttacctggcaggcaccattggttggatcggtctcggaatagcacgttagggagttaagaacatccttgtctttgcaattaacagccgtcgaacattcgccactatcagtactcccgccgaatgcctgatcccagatatagatatttgctggcaggctcatgcgatcgtaggtcgcattgaccttggtattctgtgcctgcggggcgatactggcaccgtacgcctgtacgcacagcccccctagcataacgcacaggttaaaagggttaatggctcctgcaatgataaaattaaaaccgctgattattttcaataacatatatcactacctagtttgttttcatcgccaccggtaccccagagccatggccctgccgcacggtcatcaattgcgcctgcttctgctcagctggcggtatgttagccagggtcaccccggcacagcgggtagtaccgacataacgtaccacgtcacgcatggcctgcactttcatggcacactgatagaactgtgagccacgcatcagatacagccgcttcatcggccgggtggtttccaggctaaagccaccttcgcccagcggggtccaggacagtacgttaagagggatgccgttaaccaaaggccgatcctgctcatccagcattctgcccaaccaggtgtagcgtgaagtcacctcgatttcccgccgcagcactttccccggcaccataaacgccgtacgcgttcccgcccctcggcggatctcactgctgataccggctggcgcgctcagtgattcgttgatatcaaaggtggttggctgatagcccggtacggtaaacagtgcccggctgttgctgcgcacatccgtctgaccgctgccgtctaccgctacgctgatcaatgcggcacggctctcttcgcctgcgtccactccaaccgtgatcgcggaggccgggcggccatccccccaacgtccccaataaagtccgctgcgatcgaccagtaaagaggagctataactgccactgctgctgagcgtgtgccggttcgctaccttgtcataggcatcactgacggcgaaactgccgttaccgtactgcccaccggcacgggcgtaggttgctgcggtcagggtctggctattgacgccatatatcgaagctcccagctcattttgcccactctcgtccatatagcggctgtagttggcgttataactgagttgcccttccccacgctggctattgcgatagttggcggccagagaggtattgctgttagtggcaccgccacggcgcccagagaacgataggctgacggtgaggtagccgcctttgtcggttccctgctggccgctgtcatgacgcctgaaagcactgactccgctgttgatgttaatgtcgttgaacgcaaaggaacggctgatccccatctgccaggtttgactgcgcgaacgcgtcgtgtagatctgctcccaaggggctgcgtccagatggttatcatcattgtcgggcagttcactgcgatagcggtaacgcccgccgctgctgttaagcgagtagccaatattggcgaaccactgtgcgagcgggactgaaaacatcaggttggaactctggtaacaaccgctaaagccatagtttctctgttgagaatcgcagtcaggcaccgagagggccgagcgatagaaactcaatgaaaaaccgtcgttatagttaatttgctgaatatttccccgcgttccctcgctgccggccagataactgacgcgagccgtcatgacgccatccaacgggccactgttaaaaccgtggctccagtctgccgccccttcccagtagtgtacgtcgctcaataccgtgctccccgccgtcagcgacagcgtatcggtcaacggaatgcgcagcccgccttgcaccccctgccgatcgcccgccgcaggatgcgtatcgcggtctacctcaaccccggcttgcaggaaccactgaggaccattgagctgagccacaccggtgttggtataagggacggtttctgtcctgaccaactggttatcctcatagatccgcagcgtgacggtatagctgccgctggggaaggtgcgcgtatccagctcctgtgccccggcgttcagataaaaggatgacagtaactgttcgtcacgataggcgtcgatgcgagcgttgcgcgataggaagaccgaaaccggggtcccccgggaaacctggctctggttgacccaagccgtggtcgagcctgtccgtagcccacggattttgccaatcggcaattggctcaggttgatattgcccccagcgttgctgaagatgtcgcgggagtccatcatgccgccttgcagatagaggcttttccacagatcctgccgaaaataggcattattcatctctatctgctgatggttactatggcgatagcgctgccccgtatagaaccagtcggcattaagatagccattttcagttacgcccagtgagccagtgccctgaagcgacaatgactgatagttttcatccgcaacaaaattgaggttttgctgatggatcagcgcattttcactttctgccgtcgcctgatagaaaccgctaccggccgcttttttcgggagataccgacggtcaaggaacaggttaacccgggaattattctcgtcatagatgatgccaaccgtctgggtttccagatagtcacagcttggcgcattaccgttaccgctgcaggcaaggttgccgttacgcgcgagcggttgcaccaacgcagtcatcagttgtgcacccagttcaggatcgtcgttgaattgctgcttcacggcatcagccagttccgctggctttatgaagacaacctgttccagattaatattggcttcataaagcccgagagactggccatagagggaaacatcgacccaaacaagctgcccttgtgccaaggactcaaagcctggtggaattttaggggtagccgacaaatcgtgttgcataatcataaggcctaccaacaaccctgcggataggcgagcgcgaaaagccattgttcatccctgatagaaagtggggctaaaaagccccacaagatatgaataaaacttttgaattgggcagccttaaggagccttggtcgcctgagtcaccaccaggctgacaatgccgctgtaggtgccagtggcgatagtgccttgcgtggtctgcgcaaaacgcagcggcagaacgtctgaaccattttcgatgcccgcagggaacagggtcgccgcttccagcagttggttggtggtggtcagtaccgtttcacccaggcttacggtcaatgggatcttgttagccccattgacatccgccaagcttgccgctctaaccaggcgaacgttaacaccagcggtagcgttgttagaccagaccttggtgttcaggttaaaaggcgtcaggcctttgcctggcaaatactgcatatcgatgctgcttggcaaaccggtattatcaggttgcgtcatatcaatcgtcgcatccacgttggcattcacagtaatatctttctgtacagcctgaactgaaaatacggcagccatggttgaaacgatcagcagtggtttaataaactttttcataaaatctccattttattttataaataacatccaactttactcaccccataagatcggggctatacatgatttgactccacacttaaagctttacagacaaatcaatttcttcaacgcgcttcttaagccagttaaaataacgcgctttatatttcttccctggcattaccattagcgaggcaattttaagctcggtaccgggatatatcgtggtggtttcttttttccagttgcaaacaccgccctggtcacaaacccccacctctcgtagcggaatacgcaacgtaccgtcattgataacctggccgcgctgtgcatccagcgtcaggctggcaatggcctttttaggtgcaacgtggaccaatgccccccacaccaggttgatgcctaccttggtcgtggtcatctgcgggctggcagcggcaacgttatcctctaattccggcacgccttcaaaataaactcgccaggtggtttctttttccggtaactccagggcgaccaaccgtacaaggcgttggctccctgccgaaatagccaatttttgcggcgttatcaccagcgagctttgtccaaattgttcaacgtccgcttcttgttcttgtttagtgccaggatttagtatttgtttttccattaccttgacgaattgcaccccgtcgctttgggatataacccttatttgcgcggctccagtttcgccgatcccgacttccataggataaacgctcatattggccaatacacaacctggtaaaaaacaaaaaatagcaacaccactcaggcgtttaataatattgagcttcatgattaatccgtaatgagagtctcttatatcaaactttaaaacacagccaactccagccacgcttagtctcgtaaaattcgcagcaagtataaaaaccaatgagcacgcagatcaacttaataattataataataacaacaagaataaaggactcagtaagccaatgataataaacaagataatttttaattataacaaacagaaataaacaaattataatatttaaggtgaattagaagatgaggttttaatcaatggcgcaatacgggggaaattagcttggtaagccaggacggtgacagcattttcgctgtcttattcagttcaggcagagttcctctctgcctgaacgagaaagcaaaaattgattaagctaacggctactcggcaatatccgcgtcactgctaaccaattgcattatttcgcgtaccacgctggtagcgaaactgcctgccggtaaccagaaacgtaattccacggtgacatcatcccaccagttccactgcattttctgcggctgtagcagcaaggcccgtcgtgcaggctctacgcgctcacgctttaacagactcagcaattccggctgctgcgccaggcaactttgttcaaactccagtacctctgcggcagttcccggctcaccatcccccggcaatggagcggtgatcatcagttcacccgcgtctaaccgttgttgcagggtggctagctcttccgctttggccacgaaccagctcccgcggccagccagctgtaacgcatccccttccagcaccgtttgctgctgttggttagccaaacgctggctggtaatgaggttgaacaacgcactgcggctggcagacaggtagaagctacgtttgctgcgctccttgacccggatctcatcgttggcccagcgacgtgccatcgtcaggttgttgccaccacggccaaagcgctggctgccaaagtagttcggcacgccgcccgccgcgatggcctgcaaacgctgctccacttcttggcgatcgctgatctggcgcagcaccagggtaaattcgttacccttcaacgtaccgatgcgtagcttgcgtaggtggcgagcggcctgtagcacttcgcagccttccaacgcaaactggctgagatcgggagattctttccccggcagatgcagacagaaccactgctcggtgaccgcatggcgatctttcaaaccggcatagctgaccgaacgggcatgaatgccggcaaacttcgccagagagtccgccacaaactgggtgttgcagccgttcttgcggatgttcaccaacaggtgctcaccttcgccgtccggcgtaaagcccagatcctcaaccaccacaaagtcttccgggttggctttcagcacgccggtagccgctggcttgccgtgcaaccaggtcagattagccatgtccatgcgttattccttgatcaacagggcaaccgcttcgcaggcaatgccttcgccacggccggtaaagcccagttgctcggtggtggtcgctttgacgttaacatcgtccatatggcattgcagatcttccgccaggaagatgcgcatctgaggaatgtgtggtgccatcttcggtgcctgcgcaatgatggtgacatccagattacccagacgatagcccttggcacgaatgcgtttccaggcttcacgcagcagctcacggctgtctgcccctttgaaggccggatcggtatccgggaacagcttgccgatatcccccaacgccgccgcccccagcagggcatcggtggctgcatgcagcgccacgtcaccatcggagtgagccagcagtcctttttcataaggaatgcgaacaccgccgatcaccaacggcccttcgccgccaaatttatggacatcaaaaccgtgaccgatacgcatgatgcgctcctttagttgttcaactgagtcaaatagaacgccgccagcgccaaatcctctggccgcgtcactttaatattgtccgcacgccccgccaccagcagcggatgatagccgcaatgctccagcgccgaggcttcatcggtcaccgtagccccttcatccagggcacgttgcaggcagagtttaagcagttccagcgggaacagctgtggcgtcagtgcatgccacaaatcctggcgttcgacggtgtgcgagatgatgctttggcccacctgcgcacgcttcatggtatcacgcaccggtgcagcaagaatgccgccgaccttactgtgtgccgtgatcgcgagcaaccgctccagatcgtcgggatgcaggcaagggcgggcagcatcgtggaccaaaacccaatgtgcgttgcctgccaattgcagcccggccagtaccgaatcggcgcgctgttgcccaccctcagtgaccaggacccgcggatcgctggcgatcgataatgtcttgaattgttggtcttcggggctgatagccacgatcacctgggtaatacgcggatggcgtagcaaagcgtggatcgcgtgctcaagaatggtttgatggccgatggttaaatattgcttcgggcactcggcctgcatacggctgccaataccggcagcgggcaggacggcgatcacctgaggggaggagcctacggatggattcatgcgttacttcgatgggttgttctgtgtggcagacgccgcgttgcgcccggaaggttcaggaaccagacgatagaaagtctcgccgggcttgatcatgcccagttcattgcgtgcgcgttcttctatcgcttcctgaccgccgttcaggtcgtcaatctcggcaaacagctgatcgttacgcgctttcaatttggcattgttgctctgctgagccacaacgtcatcattgacccgtacataatcgtgaataccattctcccccagccacagcgaatactgtaaccagccaagcagcgccagcaatagcagcgtcagttttcccatctccgccccctaaaaaaagcgcttaatcatcccacaacttgccgtttgactccacagcagcggcggcttttcatcttccgccctcaagcgtaatcagaatttcctgngccgccatcaagcgtaatcagaatttcctgagtttagcgcctgattgtcgcctgaaagtggcattaaatccaggtggccgcaggcagcatggatcgacgggcaccgcatgctgctgcatacatcgacatcatgcacacatcgtcgccccacatcagtatgcagtaagaataactgggctgagggtatttttaccgacatttaagccagtttttaaataattattcatatttaacactgttagcattttcatcatcaggtaggggttgtgtttttattcatgtaagtttatttttatgcatctaaagtgcataaataaatccaatgtataacctttacttaacgactcaacttattcggggattgctcatgttaaaacgtttagtgctgattagtgcctgcctggcggccactttttccgccgcttcctttgccgcagaaccgacgtatgttgtcggctctggcggtacctatcgtccgttcgaatacgaaaacagcaaaaaagagctggaaggttttgatatcgatgtgatcaaggccgtcgccaaagcggaaggtttccaggtgaagctggtaaatacgccgtgggaaggcatctttgccaccctgaactctggcgaccgcgacattatcatttccggtatcaccattaccgacaagcgcaagcagatggtcgacttctctacgccatacttcccggcagagcaggccatcgtggtaccgaaagagtctacagtagactccatcgacgcgctgaaaaccctgaaggtgggcgtagtcaactccagcaccggcgacatcgtggtttccgacgtgttaggcaaaaacagcactgccatcaagcgctttgataacaccccgctgctgctgcaagagctgtatgaagatggcattggcgcggctgtgggtgacgttggcgtggccaagttctatatcaagacccacccggagaaagagttcaagctggtgtcagacgccaagtttgagcgccagtatttcggcattgcggtggccaagggcaacgatgagctgcgtaacaagatcaacagcggcctgaagaaaatcatcgccgatggcacctacgccaaaatctaccagacctggttcgacagcaacgtccctacgctgccagcagaataaaccggctgtaaataggggcgcaattgactgtgcccctacgtatcaatgacctgcaagttcgcactaccaccgtaaggattctattttgtcagcattccgttgggagatcattgaggaatacgctccgctgtttatggagggtgcctggatgaccatcaaatgtaccatcatctgcgtgatcctgggcaccacttgggggctactcctcggcttaggccgcctggcgcaggcaccgcacggcatctggaaaccgatcctgcactattgcgtgcaatggccggtgcgcatctacattagcgccttccggggcacgccgctgtttgtgcaaatcatggtggtccacttcgcgttggtgccgctgtttatcaacccgcgtgacggcctgctggtcagcaacggtttgatgagcgtcgacttcgcgcgcgcattgcgttccgattacggtgccttcctgtcttgcgtagtcgccatcacgttgaacgccggtgcctacgtctcggagatcttccgtgccgggatccagtcgatcgatcgcggccagatggaagcatcgcgctcgttgggaatgggctacggcaaaaccatgcgtaaggtgatcctgccgcaggccttccgccgcatgctgccaccgctcggcaacaacgccatcgccatcgtcaaggactcgtccctggcctccgcgattggtctggcggatctggcttatgccgcgcgcaccgtttccggcgcgtacgccacctactgggagccctatctgactatttcagtgatctattggatcatcaccttcctgctctcgctgatggtgcaacacatggaaaaaaggttcggtaaaagtgattcgcgtacataacctgcaaaaacaatttggcgaagcccacgtgctgcgcgggatctcctgccagatcgcgccgaaagaagtggtgtgtattatcggcccatccggctccggtaaaagtacctttctgcgctgtatcaacgcgctggaaacgctttctggcggtgagatcgacgttaacggctttgccattcacgaccagaagaccgatctgaacaagatgcgtgaaagcgtgggcatggtattccaacgctttaacctgttcccgcacatgacggtgttggaaaacatcatcatggcgccgatggaggtgaaaaaactgtcccgcagcgaagccattgaacgtgccgaggtgctactgaataaagtaggcctgctggacaagatcgatgcctatcccagcagcctgtccggcggacagcaacagcgtgttgccatcgcccgcgcattggcgatggaaccgcaaatcatgctgtttgatgagcctacctcggcgctggatccggagttggtcggtgaagtgctggcggtgatgaaagcgctggcccttgaaggcatgacgatggtggtggtaacccacgaaatgggcttcgcccgtgaagtggctgaccgggtgctgtttatcgatcaggggatcatccaggaagaaggcacaccggagcatatcttcagtaacccgaccaatccgcgtacccaggcatttttaagcaaagttttgtaaccttcggcatctcttggacgcatgttcccc

SEQ ID NO: 312 - DNA, 4132 bp, unknown
  Altogen  635822 strain
aaccgtttgaaggaatggaatgacgtcaaatgggaacacattgcctatcttgcatcgtcaactgagggccaacgatgaccgtgcgagacatcagcgtcagatgcacttccgcttcctcgcgttgacagactacgctagtcaacactgcggcgagcggtgggggtaaaaagacaagcaggaaggtggcaaggaaacgaaaggcggggaaaaggccgcggcacgacgtgccgtttttccataggctccgccctcctgatgagcttcacagaaatcgatggatttccggtgctcaaatcagaagcggcgaaacctgacaggacttaaagatccccaccgtttccgatgggacgctccctcgtgcgctctcctgttcccaccctgaggtttacccgttgcagtccgccgtaaggtggcgttttctcattccttcccgtgcaactgagatccttgtaggtggttcgctccaagctggactatctgcacgaactccccgtttagtccgactaccgcgccatgccaggtaacaaactcttgagtccaaccctgacagacacgacaaagcgccactggcggtagccactggtaacagagatgtgcgagatatgtgctaagaattcttgaagtggcgaccgaactgcggctacactggaaggacagatttggtgacatgtctcgcacaagactgttaccacggttcaaaagacctgcaagttatttgaacccttgaaaaaaccgccctgcaaggcggttttttcattttaagccaagaagataacgccttaaaagtggtagtgcaacagcatttatcaacgcgcatgtaaataaaatgttcaaatcaaccaccgaaaacaatacaataaaatcagtaaatacaacaaattaataaagaaacggtatggaattaaatttatgttggtggaacattggaatatccccaccagtaagaggtgtaaaagaagataaaaccatggctataacactggccaaaaattacataaaggaaatgtcgcaagaaaaaaacgtggacttctttggtatttgtgaaatatcagaggatgaggctatagacttccaaccactggctgatgaactacaccttgaatatttaaatctatctggaaatgttgggcggataattatggacatatccataatgtatgaagcctcaaagctcgactatgtagattataaatatataatcaaaagacagcctgatgaaaggacgttacgaattgctgtaagagttattttcaaggacactacaacagggaaaatcataacgttctttttatcacactggccttcaataagaagcgcagatgaaaaaacacgagaggatgcggccgagtcattgcgaaacaacataacaaaaatattagatgaccacggacctgattcgcaaataatatgcatgggtgattacaatacaaacccgtattcagttgcaataaatgaaaaactttacgcaaccagagattatcatcgtataaagaaaaaacgaaaccttctttttaacccttattggtatttactttcagataaaaagaccaacaatctaggaacttatcattataaatcaggcgcatcgaatagatggtttgtttttgaccagatgttgttttcatcatcttttatatacggagataatgattgccttaagctagacatgagtagccttgattttcatcgtatacttagtgacgataaccagtgcttagatcagcatttttttaacacctttgatcattacccaatattttgtaggatttatcatgacaaataaagatgaagaattccaagagagattaaaagcatccctggcaaaagccaatgccacattagtattaaaggacaggatagagtcagatattacatcaatcttatccatgctgaaagatataacatccgattcaattgattttgagatttcacagaacataccagcagcaccaaggttcaaagattgtcagaaaatcgtcaaaataaagagacgatctcaatacacatattctaactctttaattttattaggatttagcataaacgaatacactggatatcctgtactagtagaaacagagagagaagtagatgaatgcatagatgttgacagcctaaaagaatccattgtttatataatagaaggaaaatcaatagatataatgaaactaatatcagaagaagctgacgacattcccttctaaacaccaaagaaagggggctagctccccccatcatgcccatctgcacttttatagaaagcgccaacaactaatcaggtcagtggcaatttaccataacatccgttgtacgctgcccatgaaaaagcccacatagcgggcttcagtcatagacttcgcggcgatggcctatggtggcagcaaggataaccagctcatcatccaggatctcacacagaatgcgataatcccccacccgataacgccagaactcgcccagctcacctttgagcggcttccctgactggcggggatcggcggcaactgcaatgcgtgaatccataaaatccacaattcgtcgtgcgttctgcttgtccatcttacgtaacgattttagcgcccggtcagaatagttaatcgtccagaccaagtgacttcctcacgtcctcagacgaatgcacaggctcgtcaccacggcgaacgcgtgccgcagtttctgctgaaagataataatcttccaggtcttccagatgcgccagtatcgcttcccgcgcatagaacgtctttgttctgccggtttgctttgccagcgagtccagacgggactcaatctcatcagatagccgaatagcaagcatgtagacctcctgaacagtaatcgctatacacgtatatcaagtatacagcagccgactcaaaagaccaaaaatctatcattcagtgattgaaaaacccccacaaggccatatttatagaacgggtattaatcccaatattttaatttaaaaaggaaaacagaatggctctatatggcgaaggaagtaacgtacatacatctaatcaacctgagcgatactcgaaaatcaggaaaatcggtgacgatcctacatcagcaggtgcaggtatctatcagtgccaaacctgtaattacgaagatgttgttaatcgtgaatgtaaaagtttgcccccctgctcaaactgcaaaaagaaaggtcactcaaacaactggaaattgcttgttcgcgcccaagatgcataaacataaaaagccgccttatgggcggtttttttgcgtcatgccacatgtatttaccataacatctgttccacgcaccgccgcagacgccctcagcgcgatcccgaggcctaagccataaaaccacctcaatcccccgccaaaatccacgcaaaatggcgtacaggccatttaacggcatgaatggttatgcagttcaacctgacgaagtggctttcgggtgggatctctgacgaacggctgatttttaccgttctgcccgcctgaaaacggtgaacgggcgagcaatttattgcacggccgttcaccgttggccaagccggcggcgcggcagtgatgatcagcggcgccagcgttgccaccaccgcatgacgatcgtcggttcggccggtaccgggtggtactccagacgcaatacggtggctttcagatcggcgatctcctgacgtaatgcccttatctcatcaagcaatatagcctgttcgtctgtgccaacaggctgtgacacagcgtgccgcgccgttgtgccagtaggctgcagttcgccatacacgcgcagcaattcagacgtctccaactcgcgccgcccaacggcattacttcgccaagataagcgccctgccgccatatcgcgatacaacgttcgccgactttttccggtcaacatctgtgtctgagccacactgtgccatgccatagagacctcctatttttggcacagtataaggggtatttggggtgtcggggctacgccctgaccagagtgttgtcaaagccagggcaccggcggtaatgacaacacatttcctgtccgcaaagatcgttttgccagcgcctccatcggcggtgctacaaaacataccctgtccctcacgagagcccccggcaggggtagctacgagtaaccgtttgaagg

SEQ ID NO: 313 - DNA, 5974 bp, unknown
  Altogen  635822 strain
  misc_feature (3900)..(3999): n is a, c, g, or t
  misc_feature (5326)..(5375): n is a, c, g, or t
  misc_feature (5547)..(5613): n is a, c, g, or t
  misc_feature (5795)..(5922): n is a, c, g, or t
ctcgacaacgacgacgagtaacctgatagccgccaatttaggtgtatcagtcgcgacttgacacggctacggctacggctacggctacggctacggcacagagccaaacccaatctgacaggtagcgctgtgccagttgcggatgttactaactctttactgcacaattattggtgagaagatcatggtcataatagaatgggcaagttcagttgcccatctaagatggcgagaagtaatttttatttaactctaaaattcagtttcgccatgaagaaaacaatcattgaattagattgcaattattaacccgagagtaactcgggtttcttgtaattaaaaatccagttgaatatcttcaactaaagttgatagttcttccgaaggaataccttgttcaatgaaatcaatcactgtcttatatttgggcgctatgttatattgttgcatagttggttttttagggtctttaaatttaacaataacatcattattaatcatataagaaagaatagttatagtagataatttcttgcgaacctcctcttgttttcgaggataaaaattacctcttttatagaatattttaaatgctttcaaaacatccgtgcgaatcgactcaagagaattttgagcttcatgttttttttctgaaattagatgtttaattaaacttaagtcgcaatcatttgaaaacaaattatcatagagtgtataatttattccttctcgtggatcaatatctttaaacgacgatcgttcaaaacgtgtatctacgttcatcatacactcccaaaaatattgataattgttaaaatgacagtttattagttttttatttctaaagtcgaatatggctttagcactagtgttaccaaaaacatctataagacatagaccatcaataacattttctgaatccgagaaaagcttctctattatttctgtttttgtttctgtattaaattgatagtcagggtcaagatttattatatctagcgcaagtataactaaggacgatatgaataattcaatactagagctgttgttttttttaataacttcaatattctccaatagaaaaagtagtaaattgtcagaaaatgataatttctctgagacagaacgagtgaaactactatcatacttcaaatagccagaaatggtatcgattgtcttttcatcaagagaattgacatctaattttttaaagtaattgactataagcaaggatttaaagtaaatatcaaaaacatcatatctgaaattgaatttatttccatggaaatctattaatgggtgacccttgaagttttctataatcaaatcaccattattgacattaatttccgataaaacatttttaacgtcatatacagaaataccgttggctttttcagatgccattctcataaaaaataatatctgcttatctactgaaaatgtacccaacttgacaatctcgcgctcacatataagagagattaaaatgtcaacgttatgatcatttgaaagaaattcactcttttgttctatttgatttaatccagaaaatgtaggggactttacaatacgagcaataatatccactaaaaacgggatatagttctttgcattttcattattttctattgcaaattcttcggcgatatctaaagctttggctattttcttctggtcaccatttaactttttagtatagaaatccaaaaccaactgttcattaaatgggcttattttaatctcgggaatgattaaacttcgtcgtacatcattccagaagtagtctcggcaagtaattaaaatcttggttttattaagctctgatgagtattcatcaaaaatagatatgataaatttttccacatcaaacttatcacccaacttcgcaattacttcatcaatcccgtctaatgcaattattaaacttccattatcgatagaaagcttgagcaattctctattaaatcttgaggcttctccgtcatcagagtccatcaaagcattatagaaatcataaacgtcacatattttgtttttagagctaaattttcttgataattcatttatgatttctttggaatcaataaatagaactccgcttttatgggtttcataaacaaagtcaagaaattgttttgcgatagtagtcttaccgataccaccatgcccactaataacaaagagaggttcattttcagaggtaaaccattgtttaacacgttctaatgcagaaacattttcctcttgttcatttttgtaaaaactgtctacaaaatcagactgatcaaatttctcatatggaaggatgcagtccttatataaaaattcatatccaaactcatcaataaaataaacatattgcgtgttaaataagcgttttatattctcttttcttttgtcaatgtcttttaggttcggcctttcaatcagaacaattgctctttcttggttaaccagatgaccatttttttttatgtctgctaatgtttttccttgatttgcattttcgtgtatatatatgaactctttaactccagaaaactcgtcaataagtctatatatttcatatataacattttctttccatgacttcgtttttacaggaaaaccctcggctaaagagtaactggcattcttatccatgtaagattgaatggttttttcaatacttctatcttttaacgttggactttcattttctgagtaaaaagtattataatcagtgctcgttctaaatttgtttagttctgttttaatgctatcaatttctaaaggtgaggcggttcgtacttcatctgttttctggcctttgcgaagaagcacagaaccagaatctaatgttctagtttttgtttgcaattctctttttaattctattaaataagcaggcggagcaatcttgaatattattatattatttccattatcctcgaattgttctattgaaaaatgaaaatgatttggggttattaaagtttctagacggcgcaatagatctttcttaaactctgtcaggtttgaaagctgcttaatattggttgtatcaatattatatgatttaccttcggtctcagaatagccaaatattaagtgtcgatacttcccagtataccccaagtagccgttaaataaagaaactagatcttttaaaaactcaccccatttaacattcatttcatctttttctgtcgtgtcgttccagtaccactctttcttaaattctaagattggggactcgctttgacctagcaaccactggagatctgtaatcatgattattccttcggtatcaaataaaaatgtgcatggaatttagccaatcacttgaaatcgagcactcatgctgccaagagtgcagtttggtcttctcgagtataacgcatcactgagactgaataaagtctgctttagaaattcagcaaccattgaaattactacaataagagattaaatgactttaaatccttgtttaacaattaattatgctcttgcttcattcctcattttgctgagagcgctattgaagttacgtgcagctaaactgctatcaagctaattgaagctcttcaaattagccatgtttggtctgctctctgctgactaatatacaccaatataagtatggctctatcagccgtgagaacgattgcgaacttcagctcatcgctcaaagccgacagtcagataagattgtgctctatccgcggtgactgtcagatctggcctgaggtgatacaatttaggcggtttttctataccacgctgtaacgctctcagacgcgcgtcacgcaatgcaacccctccccctacccagcattcgatttcaaaaattcgacgccgccacgacgcgaaaaacaattattttttaaaaataaaattcactctgcgcgcaatgcnnnnnnnnnnnnnnnnnnnnnnnnnnnnnnnnnnnnnnnnnnnnnnnnnnnnnnnnnnnnnnnnnnnnnnnnnnnnnnnnnnnnnnnnnnnnnnnnnnnntcatattcatgcacgctatgcatgcatagcaattaccggctaattttcgacaatttgaatgatatcgccagttcgaatatccacgcgagcggcaaccgtctgcttaactacaccaccgtaggcatttgtccctcgaaatgtagttttaaccacagcgtgcgggtcacgtcctagcgatagccgataggtggtagaaacatgcttatacgatttatcatcattcatacctaacttaatcaatttttcaagcggcctataagaaccactccaaccactaaagttaccctggaacacgtcaaaatttattcttttggtcaatgatttcgggtcttgactgtaatcagcctcacaccaacccaatacatcacctagcgccaaatcatcagccttggtaaaactatgttcactcaggcaagcataaaaactatcagttgcgctttcaggcacgcctttagactttacatagtccgagactatctctcggcgcttgtccttagcctcctgacgataatcacctaacagcatatccgatttatcaaaccgaacaggctccaacggcttttcatctgcaggtacaagcttatctgttgctggctccaatggcttttcatctacaggcttatctgttgccgccacaccgctaactttttccgttggatagaaagtagcccccaaagtggacacacaaataaaaatgatgccataaactacactagagcttattctgcttgtcattttgacccatgcaggcttaatcaggccaataaaaaatgccaacatggtaagcaaagaaatcatggcaatgactgtttccacgagcaatccctcttatgaattaatttttaactatcagtaacaccataaaaaacggtagcggtatgatagcaaaccacccataagcccacctaatcagaatggatattgaaccccggccactcatcatgcgctggatatgaataaagcttgtcgttatagctaaccttgcccccacgaaccaatgaactcaactcccaacgttcggcagtgatgccatcacgcgccagctccaggcgaattttaggtatgcggtcacgctccgatgaagtcagacgggctgatggggcgtcaattcgtgaattattgcggtttttgatgcgcagttggccgctggcctttggtgattgcccccttacagcgtccttaagcaccctggcgacgtctgggtcatcccagctaacatccccgctctcaatcaaattcatcaccgctgtgacgtactcaggcggcgtaacagtcaaaactggctccggttcttgcccaacctccccacagttattgacaggactcnnnnnnnnnnnnnnnnnnnnnnnnnnnnnnnnnnnnnnnnnnnnnnnnnntgttgtacgggtttcaaatacatgaccagagccaagatgcggcgcgaagatgccaacaaccttttgcacctcctcgtcgtaggcattcggctcatcggccaccttgcgtgctacacgtacggtctgaacgtcacgcggtacgtttgcaccgccctgcccggcgatgtatgcnnnnnnnnnnnnnnnnnnnnnnnnnnnnnnnnnnnnnnnnnnnnnnnnnnnnnnnnnnnnnnnnnnnggcaactggcgcggcattcgcggtatgctcccatggtgggaacaccaatagatttaaattgagggatgcgccacgttgacgcccaggaagtcacagcggcggccatatctcgcagcggcttaccggtatcgtgatcgatctcaccgtccagcgcatagccgtcgatattcttggcaatgtannnnnnnnnnnnnnnnnnnnnnnnnnnnnnnnnnnnnnnnnnnnnnnnnnnnnnnnnnnnnnnnnnnnnnnnnnnnnnnnnnnnnnnnnnnnnnnnnnnnnnnnnnnnnnnnnnnnnnnnnnnnnnnntcatcatgtgccagtgcggtgtaccatcatggtgcggctcaacaacgcgcat

SEQ ID NO: 314 - DNA, 24850 bp, unknown
  Altogen  635822 strain
ccacagggagagggagctgaaagtccctgatctgttgggagacagaagataatcttagcaatacgtcagggattcgccatgtcctataggtgctggtatcagatatggatttcaatcagtaacaggattaatgttaaaggcgtgtaccgtaattaaattgtggcacgttaagtcccctctcctgggaaagagggttagggtgagggcgttttcttggcgttacggacacaacctaagctttgttagttgctgtagttggcaaacagcgcgatgattttatgaagacgtttgatcatttgcaggttctcattttttttgtgatgtatatcacaaaaaattctacgcctgctaatgaggtgattcaacccccgcagaaaaatttcccgttcggcaaccctctgagcaaatcaggcggtgattaaccggccctatggcgttatgctatcctcacgcactttccttgttagcatatcttcccctggaggaagcatggatcaccgtttactcgaaatcattgcctgcccggtttgcaacggtaagctctatttcaacaaagaacatcaggaactggtctgcaaattggacggcctggcctacccattacgtgatggtattccggtattgctggaaaacgaagcgcgtactatcccactggacgagaaacacgcatgagttttatcgctatcatcccggcgcgttacgcgtccacccgcttgccgggtaaaccgttggcggatatccacggtaagccgatggtggtgcatgtgatggaacgagcccgtgaatcaggggcttcccgcgtgattgtcgccaccgatcatccagaggtggccaaagcggtcgaggctgccggcggtgaagtttgcatgaccagcccggaccaccattccggcaccgaacgcctggcggaagtgatcgagaaatgtggctttgccgatgatgaaatcattgtcaatgtgcagggcgatgagccgatgatcccgccggttatcgtgcgtcaggtggcagaaaacctggcggccagcagtgcagggatggccacgttggcggtgccgatcgaaaccgcagaagaagccttcaacccgaatgcggtcaaggtggtaatggatgcacaaggctatgcgctctatttctcacgcgccaccatcccttgggatcgtgagcgttttgctcagtcaaaagagagtattggcaacagcctgctgcggcatatcggtatttatgcctaccgtgccggttttgtccgccgctacgtcagttggcaaccaagccagctggaacagattgaactgctggagcaactgcgcgtgctgtggtacggcgaaaagatccacgtcgcggtggcgcaggccattccgagcgtcggtgttgataccccagaagacctgcaacgagtgcgggacagcatcaagcgttgagttgtctattggccggggaccccggccatttcaattccctgatttaccccttttattgatctgcattgaagaatttctccgctcaccgttcaatgatgactgatgcttatccttaatctggagggtttcgtcccatggagcagctgcgtgccgaattgagtattgtgctgggagagtccgtcggtcgtctggaacgcgtcagcgaacagccttatgcccatctttattcactgtacgatcgccaggatcatgcgatcccactgatggcgaaaagcttcgtctgtgagggcattgcccagcaggaagcttacaagctatccatgttggcgcgtgaaggagacattcgtctgccaacggtgtttggcgtggtttacacccggcaagcgccctacaaagagattttgctgatcgaacggctgcgtggcgtgtcggtcgaggcgccaacccggactttggcccgttgggaagccttgatggaccagattgtcgacggcatgctggcttggcaccgtattgacagccacggctgtgtgggcacggtagacagcacgcaggagaatgattggtgcagctggtaccagcagcgtatcgaggtgctttggtcaactctgggtaatcttaactcgccgctgttaagcatggcagatcgccgtctgttgtaccgcacgcgcgaaatgctgatcgacttctttgccgattttgacgacccttgcgtgctggtgcacggcaatttgggcttgcgcagcatgttgaaagatgccaaaaccgatcaactgctggcgatgctcaacccaggcatgatgctgtgggcgccacgggaatatgagctgttcaggctttgcgaggcggggatgccggatcaactgctgttccactacctacagcgtgcgccggtggcagagtccttcctgtctcgtcgttggctttatgtggtgtgggaggcggtagccaggatgatccataccggcaagctggatcgcccggcgttcgatcaggccgcacaacagctacggccgtggttggctcactaatcgctgctggtctcaccgtcaccttttagctgttgccacaggctgcccagcgtttcgtatgcggcccgttcgctgtgcccaaggaacatcgcggaaggcatcacccgatcccagatattcagcggagaggtaatggccagttgattggccggagccgggattggatgcaggccctgagcctcaaagaagcgcatggcacgcggcaagtgattggcggatgtcaccagcgcaaacggctgttgccctaccaatttggcgacctctgcggcttcctgttcggtatcccgcgggcggtccaccagcacgatgtcgttggcaggcacgcccaggctttccgccaccagtgctgcggtggccgcgctgctttgcgttttcgcgccttttccaccggtaaagaccatcttgctacccgggtgcgacaggtatagcctgacgccttcggtcacccgtggcaggctgttgttgagcaggttagagctaggagcccagtctgggttataggtataaccgccgccaagcaccacgatatagtcaatctggccgttgcctctataggtcgggtaactggattctaacggcctcaacaggcgatcggcgaccggttgcaggctgagcaacagcaacagcagccagctcaggcttaatatgactttgccgcttttctgccaacgggtaaaccacagcagcaataatgccagccccattaacaacagcagggcgggtagaggcatcatcaggccaccaataaatttttttaagtgaaataacatcaaaaatcaggtccttttgggcgaaaaaacgacatctggccgcattcatgctgcaagaagatttattctaagccagtctgtgccaaaatagcaggtttgaatgggcaggcgctttgccgtcggccaagatagaatcagcggagccgttgtccatgcaggatcgcaattttgacgatattgccgagaagtttgcgcgtaatatttacggcaccaccaaggggaaaatccgtcaggcggtagtctggcaggatctgaccacgctgctggcccagttgccacagcggccgctgcgcattctggatgctggtgggggcgaaggccacatggcctgccaactggcagaattaggacatcaggtcttgttgtgcgatctttctggtgagatgatccaacgcgctgcgttgctggccgagcagaaaggtgtgagccagaacatgcaattcatacaaagttcggcgcaagagattggccagcatttggcacaaccggtcgatctgatattgtttcatgcggttttggagtggatcgccgaaccacaggtggcattacaggcgttgtttgattgcctggtgcctggcggtgcactgtcactgatgttctttaatgccaacggtttgttgatgcgtaatgtggtgttgggcaatttccaactggtagatcccgaggtcaggcggcgtcgcaagcgctcgctgtcgccgcagtatcctcatagcccaccgctggtctacggctggttggagcagatgggtatgcagatttcaggcaaaaccggcgtgagggttttccatgattatctgcaaagcaggcagctacagacccaaaaatttgaagagttactggcgcttgaacagctttattgtcggcaagagccttacgtgagtttggggcgctatattcacgtctcggcgcataaaccgaacctgaaggacgaactatgagtgaattttcccagacagtacccgaactggtcgcctgggcacggaaaaatgatttctctatttcgctccccactgagcgtcttgcgtttttgctggctatcgccacgttaaatggtgagcggctggacggcgagatgagtgaaggtgagctggttgatgcatttcgccatgtcagcaaagggtttgaacagacgcatgaaacggtggcgatacgcgccaacaatgcgattaacgacatggtgcgccagcgcctgttgaaccgttttaccagcgagttggcggatggcaatgccatctatcgcctgacgccgctgggcattgggattaccgattactatatccgccagcgtgagttttcgaccctgcgcctttccatgcagttgtcgatcgtggcggaagagttaaagcgtgccgcagacgctgccgaagaaggcggcgatgatttccattggcaccgcaacgtctttgccccactgaaatactcggtagcggagatcttcgacagtatcgatctgacccagcgcctgatggatgaacagcagcagagcgtgaaaaccgatattgcggcgctgctcaaccaggattggcgtgcggcgatctccagctgtgagatgttgctgtcggaaacctccggtaccttgcgtgaacttcaggatacgctggaggccgcaggtgataaactccaggccaacctgctgcgtattcaggatgccacgttgggtgagatggagctgggctttgtcgataagctggtgtttgatttgcaaagcaagctggatcgcatcatcagttggggccaacaggcgattgacctgtggatcggctatgaccgccacgtgcacaagtttatccgtaccgccatcgatatggataaaaaccgcgtgttcgcccaacgcctgcgccaatcggtacaaaactacctcgataacccttggacgctgacccatgccaacgccgatcgtctgctcgatatgcgagacgaagagttggcgttacgcagtgaggaggtcaccggggaactgccgccagatctggaatatgaagagttcagcgaaattcgcgaacagctggcagcgatgatcgaacaggcgctgaaggtttaccaggaacaaaaaatgccgctcgatttaggggcagtgatgcgcgattatctggcgcaatatccgcgtgtgcgtcattttgacgttgcccgcatagtggtcgaccaggcagtgcgccttggtgtggctgaagctgatttttcagggttgcccgcgcagtggcaggcaatcaatgattacggagccaaggtacaggcccatgtcatcgacaaatattgaacaagtaatgccagtcaagctggccaaggcattgtctaatacgctgtttccggcgttggacagccaattgcgcgcaggtcgtcacatcggtatcgatgaattggacaaccacgcattcctcatggattttcaagacgagctggaagagttttatacccgttacagcgtcgagctgatccgggcgccggaagggttcttctatttgcgcccgcgctcgaccacgctcattccacgctcggtgctttccgagctggacatgatggtcggcaaaatcctgtgttacctctacctgagccccgagcgcctggcgcacgaaggtattttcagccagcaggagctgtacgatgagctgctgagcctagcggatgagagcaagctgctgaagttcgtcaaccagcgctccaccggttcggatctcgatcgtcagaagctgcacgagaaagtgcgctcctcgctcaatcgcctgcgccgtctgggcatggtgtatttcatgggcaatgacaacagcaaattccgcattaccgaggcggtgttccgcttcggtgccgatgtgcgtagcggtgacgacccgcgcgaagcccagttgcggatgatccgtgacggtgaggcgatgccggttgaaaacagcctgtcactgaacgatgacgttgatgcggaagatgcgcaggcagaagccaccccggacagtgcagaggatgaacaggaatgattgaacgcggtaaatttcgctcactgacgctggttaactggaacggtttctttgcccgaacctttgatctcgatgagctggtcaccacgctttcgggcggtaacggggccggtaagtccaccacaatggcggccttcgtcacggcgctgatcccggatctgacgctgctgcactttcgtaacaccaccgaagccggtgccaccagcggttcacgcgacaaaggcctgcacggtaaattgcgtgcaggtgtctgctactcaacgctggacgtcgtcaactcacgccaccagcgtgtggtggtcggggttcgtctgcaacaggtagcggggcgcgatcgtaaggtcgatatcaaacctttcaccattcaggggctgccaacggcggtgcaaccgaccgaactgctgacccaaaccgtgggcgaacgtcaggctcgagtcctctcgttgcaggaactgaaagagcgtgtggaagagatggaaggggtgcagttcaagcagttcaactccatcacagactaccacgccctgatgtttgatctgggggtgctgcccaagcgcctgcgcacttcttccgaccgcagcaagttctatcgtctgatcgaagcctcgctgtacggcgggatttccagcgccatcacccgttctctgcgtgattacctgctgccggaaaatggcggcgtgcgtaaagcgttccaggatatggaagctgcgctgcgcgagaaccgcatgacgttggaagcgatccgcgtcacccagtcggaccgcgatctgttcaagcatctgatctccgaagcgacctcgtacgttgccgcagactacatgcgccacgccaatgaacggcgtatccatctggatggggcgctggtattgcgcaacgagttgctgagcagccgcaaacagctggctgccgagcagttccgtcacgttgaaatggcgcgtgagctggctgaacaaagcggtgccgaatccgatctggaaactgattatcaggccgccagcgatcacctcaatctggtgcagaccgcaatgcgccagcaggaaaagatcgaacgctatgaaggcgatctggaagagctgacctaccgtctggaagaacagaatgaggtggtcgccgaagcgagcgagcagcaggcggaaaacgaagcgcgtgccgaagccgcagagctggaggtggatgagctgaaaagccagctcgccgattaccagcaggcgctggacgtgcagcaaactcgcgccattcaatatcagcaggcacttcaggctcttgaacgcgcccgtgcgctgtgccaggtgccggaactcaccgccgaaaatgccgaagagtggctggataccttccaggcgcgtgagcaggaagcgacagagtccctgttgcagttggaacaaaagttaagcgtggcggatgccgctcatagccagttcgagcaggcctatcagttggtgggtaaaattgcgggcgaagtcagccgtagtgaagcctggcaaactgcgcgtgagctattgcgtgactggccttcgcagcagcatcaggctgagcgtgtgcagccgttgcggatgcgtttgagcgagctggagcaacgcttgcgctcgcagcaggatgccgagcgtctgttgcaggagttctgtaaacgtcacgggcaaagttatcagccggatgaacttgatgccttgcagcaagagctggaagagcgtttggaatcgttgtcgcaaagcgtcagcgaggccggtgagcgccggatggaaatgcgccaggagctggagcagatccaacagcgcatcaaagagctgaccgccagggcaccgatttggttggccgcgcaggattcactgacccagctcagcgagcagagcggtgaagccttcgaagatggtcagcaggttaccgaatacatgcagcaactgctggagcgcgaacgcgaaaccacggttgaacgtgatgaagtggccagccgcaagcgcgaaatcgaagcgcaggttgagcgcctcaaccagccgagcggggcagaagatcagcgtctggtgacgctggcggagcgctttggcggcgtgctgctgtcggaaatctatgacgatgtcaccattgacgatgctccttacttctccgcgctgtacggcccgtcgcgccacgccatcgtggtgccggatctgtcgctggtgcgtgagatgctggaagggttggaagattgtccggaagatctctacctgatcgaaggggatccgcagtcgtttgacgacagcgtgtttgccgtcgaagagcaagaaaaagcggtggtggtgaaaatcgccgatcgccagtggcgttactcgcgctaccctgaggtgccactgtttggccgtgctgcccgggaaaatcgcctggaagtgctgtacgcagaacgtgactcattggccgaacgctacgccaccttgtcatttgacgtgcagaaaacccagcgttctcaccaggcgttcagccgctttatcggttcacacctcgccgtggcgtttgacgcggaccctgaagcggatatccgtgctctgaacagccggcggggtgaaattgagcgtgcgctcaataaccacgaagcgcagaaccaacagcagcgtcagcaatacgatcaggccaaagaaggcatttccgcgctcaaccgcctgatgccgctggtctcactgttgaatgatgaaaccttgcaggatcgtgtcgaagagatccgcgaggaaatggaagaggcgcaggatgctgcgcgctatatccaacagcacggcgtttccttggccaagctggagcccatgttgtcggtgctgcaaagcgatccggagcaacatgagcagctacagcaggactatgtacaagcccaggccacccaacgtcaggccaaacagcaagcctttgccctgacagaagtggtgcaacgccgcgcgcacttcagctataccgactctgccggtatgcagaatgcggataacgatctcaacgataaactgcgtcaacgcctggaacatgcggaagcggaacgtacccgtgcccgcgagcaactgcgccagtatcagacccagtttacgcaatacagccaggtgctggcctcgctgaaaagctcttatgacgccaaacgcgacatgcttaaagagctgagccaggagctggtggacattggcgtgcaggccgatgccaatgccgaagcccgcgcgcgtcagcgtcgggacgaattacatgcctcgctgagtaataaccgtaaccgccgtaaccagttggagaaacagctgaccttctgcgaagcggaaatggacagcctgcaaaagagactgcgcaagctggagcgtgattattaccaactgcgtgagcaggtggtgaccgccaaggcgggctggtgtgccgtgatgcgtctggtgaaagacaacggggttgaacgccgtctgcaccgtcgtgaactggcctacatggacggtgacgagctgcgttcgatgtcggataaggcattgggtgcgctgcgtctggcggtggcggataacgaacatctgcgtgacgtgctgcgcctgtcggaagatccgaaacgccctgagcgcaaaatccagttctttatcgcggtctatcagcatctgcgcgaacgtatccgccaggatattatccgcaccgacgatccggtcgaagctatcgaacagatggagatcgaactgggtcgcctgaccgaagagctgaccgcgcgcgaacagaaactggcgatcagttcgaagagcgtggcaaacattatccgcaagaccattcagcgcgagcagaaccgtatccggatgctcaaccaggggttgcaagcggtttccttcggtcaggtgaagagcgtgcgcttgaacgtcaacgtgcgggaagctcatgccaccttgctggatgtgctctccgagcagcaggaacagcatcaggacctgtttaacagcaaccgtctgaccttctcggaagcgttggccaagctgtatcagcgcctgaatccgcagatcgatatgggccagcgcacgccgcaaaccatcggtgaagagctgctggattaccgtaactacctggagctggaagtggaagtcttccgtggctccgatggttggctgcgggcagaaagtggcgcgctgtctaccggggaagctatcggtaccggcatgtcaattctggtgatggtggtgcagagctgggaagaggaatcacgccgcctgcggggtaaagatatttcgccttgccgcctgctgttccttgatgaagccgcgcgtctggatgccaaatctatcgccacgctgtttgagctgtgcgatcgtctggagatgcagttgattatcgccgcgccagaaaacatcagcccggaaaaaggaaccacctataaactggtgcgtaaggtgttccagaaccatgaacatgtgcacgtggttggcctgcgagggtttgccagcgaacaaccggctttagacccggtgtcggaataaacgtcacaaagctaaaaaagtgcactataaatctgaaaatagccgcctgaaggtggctatttttttgcatgacgaggatgataggcgtgtttttttgccggtggtaagctgggatgaaacagttatttacggcgccgagagcaaaagcgccgttctgtttgtatactgaaactaataatagtctgtgcggtatttttgtgagcctacagggggcaagggatgttgcttaaaaatggaaactcagtacgacgtctggcattgagttgcgcaatagcgtgtggttttgccgtgtcgttttccgcatgggcaaccgttccggcgttaccggtggcgtcatcgtcatcgggaatgtccgtggcacaaagtcgtgccgaactgcttgcggcattgccgaaaagcgttgtgccatattatctctccactttggcaccgctgtacgctgccaaccagatgcagcctatgtggcaagatcgggaagcggtacagcaatttcagcagcagctggctgagttggcaatttctggcgtacagccgcagtttacgcaatgggtaaaactgctgaccgacccgctcatcaccgatatggcgcgtgatattgtgctgtcggatgcgatgctgggttatttgcagtttgtttcctcaatcggggccaatggcaacaactggctgtacagcaacattccttacaagctgaaggtgccggcgaatacggtgatcaaccagtggcagctctcgatgcatcagggcaaatcgctggcctacatcaattcgttggccccgcagcatcctcagtacgccaaaatgcacttggcgctgcgcgagatgctggctgatgggcgcccgtggccacaaatgaccaatggagcaagcctgcgcccaggtcagctcagcgacgatattcctgcactgcgcgatattctggcgcgtaccgggatgctggtcgccactccggcggtagcagccgcttcatctgaacctgaagtcaccaacgccaacgcggccactccggcggtggatgatgacctgtcggtggatgaagagaagaatcgtgtgaccgcaggcgctgttgtcagccctggagcagcaccgatcaaagatcttgcgccatctccagaagtgaccacgcaagtacaacctgccagtccagtttccgtaacggataatcgttacaccgaagatctggtggaaggggtcaaacgtttccaaacctggcaggggctgacgcctgatggtgtcatcggtacccggacgcgtgagtggctgaacgtttcgccacaaacgcgtgcttcactgctggcgttgaatatccaacgcctgcgcattctgccagggcacgttgataccggcataatggtcaacattccgaactactcgctcacctactatctgaacggtaatgaagtgttatcttcgcgggtgattgttggccgtcctagccgcaaaacgccgttgatgagcagcgcgttgaataacgtggtggtcaacccgccgtggaacgtgccaaccaagctgatccgtgaagatatcgtgcccaaggccatgcatgatgccagctatttccagaaacacggctaccgggtgttctcgggttggagcaacgatgcggaagtgatcgatccggccatgattgattgggccgtagtttcgccacgcaatttcccttaccgcatccagcaggcgccaggtaccagcaactcgttagggcgtttcaagttcaacatgccgagctcggatgccatctatctgcatgacaccccgaaccacggcctgttccagaaggatatccgggcgttaagttctggctgtgtgcgcgttaacaaggcttccgatttggccaatatgttgttgcaggatgccggttggaacaacgcgcgtgtttcctccacgctgaaaggcggcaatacgacgtatgtgaacatccgccagaacatcccggtgcagctgtattacctgacggcctgggtctctgatgatggtaagccacagttccgcacagatatttacaattatgatgcgacagtgagatcgggtgcacaaattttggctcaggccgaaaaattgatgcaataaatgcagtaattctagataaataacggtctgaatgtctggccagtaacaggcactgttttttgtgagtgctggtaaaccacagcgtatcgcgggttgactccgcatacgctggcggttatggttcgggcagtgcgcagttttgtgcatatattttgacattcttgccgggtttaaagagtcatggacaaaattgatcatcatcgccgtaaatggctggcgttaggtagcgccgccgtgggtatcgcactgcttccagggcaggcgtttgccagtctttctacctctcgcccacgtattctgttgttgaacaacctcaataccggcgaatccatcaaggccgagttcttcaacggtaagggttacaataaagaagaattggcgcgcctgaaccacatcttccgtgactatcgggccaataaggtcaagagcatcgatccggctctgtttgatcatctctatcgcctacaggtgatgctgggtaccagcaaaccggtacagctgatttccggctaccgttcaatggcgaccaataccgaaatgcgtgagcacagccgtggcgtggccaagcagagctaccacaccaaaggccaggcgatggatttccatatcgaagggatccagctgagtaatatccgtaaggccgcgttaaaaatgcgtgctggcggggtaggctattatccacgtagtaactttgtgcacatcgataccggcccggtgcggacctggtaatcattgtgcatcatgatcgctgaatggcacccgccccttgggcgtggtgccgttgtcgttggagctttatgaaataccatattatccccgttacggcgttcagtcagaactgtacgctcatctggtgcgacgtgaccaaacaggccgctctggtcgatcctggtggcgatccggaaaaactgaaggccgccattgccgaaaagggcgtgcagatcagccagatcttactgacgcatggccatctcgatcacgtaggtgcagcggcagaaatggccgagcattatcaagtgccaatctatgggccggataaggaagatgccttctggcttgaaggtttgccagcgcagagccgtatgtttggcctggatgaatgcgccgctctaacgccgaccaaatggctggaagagggggataaagtgcaggtgggcgaaatgtcgctgaacgtactgcattgccctggccatacgcccggtcacatcgtttttatcaacgaacaggcgcgtttggcattggtgggtgacgtgttgttcaacggtggcgttggccgcagcgatttcccgcgcggagaccatcaggcgctaatcgcttcaatccgcagcaaattactgcctcagggcgatgatatggcgtttattccaggacatgggccgatgtctacctttggccatgaacgtcaaaccaacccgttcctgcgcgaagagccagccatctggtagagatctcccatacaaaacaacaaaggggcgcatacgcgccccttttcaatgctaaatccgcttacagcacggcaacgatggcttcgcacagcggcgccatattgtccggcgtcatccccgccacgttaacgcggccggagttaacggcatacacgccaaattcatcacgcagacgcagaacctgttctttggtcaggccgctgaaagagaacatgccgttctggttgatgatgaagctgaaatcctgctgcgcccctttttcctgcagggtattaacgaacagctggcgcatacgatgaatgcgttgacgcatgtcggtcaactcttgttcccaaatggcgcgcagcgctgggttacccaagatagtggcaactacggcggcaccgtgtgatggcgggttcgagtagttggcacggatcgcggctttcacctggctgaaggcacgctcggcggtttctgcatcggcagccaccacggtgcaggcaccgacacgctcgttatacaggccgaagttcttcgagtaggagctggcaacgatcagttcctgatgtttggctgcaaagatacgcagaccctgcgcatcttcttccaggcccttggcgaagccttggtaagcgaagtcgaacagcggcaaccagcccttggctacggacagttcagccaactgagcccattgtgcttcggttggatcgataccggtagggttatggcagcagccgtggaatagcaccacgtcgccagcctgagcctggttcaggctggtgagcaggccgtcgaagtccagcgcatggttggcggcgtcgtaataattgtattccaacacttccaggccaacggcaccaaagacgtttttatggtttggccagcttgggttgctgacccagatacgcttagcgctggtctggttggcaataaagtcggccgctacgcgcagggcaccggtaccaccaggggtttgcgcggtacgggcacgcttgtcggcaatgattgggctctgcttgccgaacaatagctcttgcgtgcagctggcaaattcaggaataccttcaatgcccaggtagtttttggtggtctcattttccagcagatactgctcagctttcttgacgctggtcagcaccggcgttttgcccgtttcgtctttatagacgccaatacccaggttgattttattctcacgcttgtcggcgcggaaaatgtcggtcagacccagaattgggtcggcaggtgcagcgatgattttttcaaacatgtcagatgcttccatggcctagagttaagcagacagaaacatcagggtagcgccagttatcgcctttgccaaccgtttgcgagaaaaacacctcgatcttgtgacggcggcagattcagcacaaaaaatgacggggaagggcggattggcagaataaaaaatggcgcaaagcgctaaaaacaaaaacagggccgaagccctgttttttaacttagctgacggtaaaccgtcatcaagtgcaacaacttagaactggtaaaccagaccggtagctacgatgttgtcagtagcgatgccgttagcacgagtaaagtcgttttcgtccagcaggttgattttgtagtcaacgtaggtagacatgtttttgttgaagtagtaagtagtacctacatcaatgtatttaaccagatcgttgtcagtgccgttagggccagtcaggtccttacctttagactgcaggtaagcgatagatggacgcaggccgaaatcgaactggtactgtgctaccacttcaaagttctgagttttgtttgcaatgctattaggagctttagacgtgctaccgaatggagtcatgttgcgagtttccgcatacatggttgccaggtagacgttgttggcatcgtatttagcaccaacggtccatgcatcagctacgttaccgccagcagtgctgttatctttctggtcaatggtacggttagatgaagagtatgccgcacctaagctgataccggtatccagaattgcgtaggtggtagaaacaccaacaccgtcaccgttttgttttttgatgtcacgatcgtcgttttcgttcttgccttgatactgcagagcgaagttccaaccatcaaccataccgaagaagttgttgttacggtaagtagcaacaccgttagcacggccggtcatgaagttgtcggtagtggtgtaagtatcgccaccgaactctggcagcatatctgtccagccttcaacgtcatacactacgccgtagttacggccgtaatcgaatgaaccgaattcagcaaatttcagacctgcgaagcccagacgagtcttagtaccttcggtaccttgtgactcagcgtggttagcttgcacgttgtattcccactggccgtaaccggtcagttggtcagtaatctgggtttcacctttgaagccaaaacgcacgtatgactggtcgccatcgttgcctttgtctttagagaagtagtgcagaccgtcaactttaccgtacagatccagtttgttgccgtctttgttgtagatttcagctgcgttggctgcaccagctgctaacagagctgggatcactactgcaagaatgttgcgcttcatcatcattattaccctcattggttttattcggacaccttgccactgccgccaataattcttttggaactattgttgatagattggtgtcgtcctgtgtctgcacgcagtgttccattcacgggcaggtttatctagaacgaaaatgctaccaatgtcgcaatctggtttcagaaagcaacgatgtgtaacaatttatgtattttagggaactttgtgatgtaggtcaataatcaaaaatgcgaaaggccagctaagctggcctttattatgtaaaaaaaatgtttaaattatgctgggttttatgacttagaagctggcgttacgtggcgttcttgggaacgggatcacgtcacggacgttctgcaccccggtgacataggcgattaaacgctcaaaacctaagccaaaaccggaatgtggcacggtgccatagcggcgcaggtcacgataccaccaataatcttctttattgaggcccatctctgccagacgctgatccagcacatccagacgctcctcgcgctgtgaaccaccgatgatttcaccaatgcccggtgccagcacgtccatcgccgcgacggttttgccatcttcgttcatgcgcatatagaaggctttgatatctttcgggtagtttttcaccactaccggggctttgaagtgttgctcggccagatagcgttcgtgttcagatgaaagatcgataccccatgaaaccgggttctcgaaggtcttgccggaagcgatcaggatctcgaccgcttcggtgtagtccacctgggcgaaatcagaagagacaaagcgcttcaggcggtcaatagcgtctttatctacccgctcagcaaagaattgtagatcgtcggcacgttcatccagcaccgcctggaagacatacttcagcatgctttcggccagcccggcaacgtcgtccagggtagcaaaggcgacttccggctcaatcatccagaattccgccaggtgacggctggtgttcgagttttcggcacggaaggtggggccaaaggtataaatttttgacagtgcacaggcgtaggtttcgccgttcaactggccggatacggtcaggaaggcttctttaccgaagaaatcctggctgaaatcgaccgcacctttatcggtgcgcggcaggttttccatatccagcgtggagacgcggaacatttcaccggcaccttcggtgtcagaggcggtgatcaacggggtagaaacccagaaataaccgttctcgtggaagtagcggtggatagcctgtgccaacgtgtggcgaacgcgggcaaccgcgccaatcaggttggtgcgtgggcgcaggtgggcaacttcacgcaggtattcgatgctgtggcgtttggccgccattggataggtgtccggatcgtcaacccaaccaaccaccttgatggccgtggcttgcagttcgaaactctggccttcacccggcgatggcactacggtaccggtcacttcaacggaacagccggtggtcaggtgtaacacttcgtcctgataattcggcagagaatcattaacgacggcctgtaacggattaaagcaggagccgtcataaacggcgaggaaggagataccagctttagaatctctccgggtacgtacccaaccgcgcacggtgacttcactgtcaaccgcagcacgaccttgcagtacgtcgactacaggcactacgctcatagatttctctcttataagtttttcagaaataggctaacaacccaagaatttggggatgttgctatgttacttgccgcgttgcagagcacaagcagaaatcatcagaatgggacaacatttattgcagtgggataaaaaacaggaggtatataaaggaagagagggatcgctggtgagaaatgccacacggcttgtatcaccggttggctcctgttccttaatgcacctccgtacagttccctctcccagtgggagagggttggagagagggggcaccttaactggctttcttcaccagtggcagatcgaaggctttgcgcagtgctttgacaaacgcagggtcctggcagatggttttgcctgggctatcggacagtttagccaccggcttgcctttacactcgaccagcttgatcacgatattcaatggcttgacgccggggatattgcaggtcagacgcgtgccgataccgaacgccaggttgatacgccgatcaaagtggcgatacagcgccaacgccttatccagatccagattgtctgaaaacaccagcgtcttgctcatgggatcgatacccaattgctggtaatgggcaatggctttttcaccccattcgatcggatcgccagagtcgtggcgcaacccttgataacgctgggcaaactgcttgccgaaatcacgcaggaacgcatccatggtgatacagtcggtaagtgctatgccgagctgatcgggatattcatccagccaggcctgcaaggcggcacgctggctgttggccagcaccgggctaatctgttgatgagcctggaaccattcatgggcttgtgtgccaaccggtatcagatccagtcgatgcgccaaatcgtagttactggtgccaaccagataggggaattcgtttttcaacgtgctgacaatggcttgttgcacatcgcgggagaagcgacgacggctgccaaagtccatcagcttgaagcgtgagatatcaatatctccgctcagttgcttgaactgtgccaggttctggcgcaactggctgattgccatctctggcgtggcctgtggagagcgctggcggtgcacgacttcgctgatcactgccaataacggcacttcccacataatcacttcgcgccaggggccagcgatacggatatgcaatttgccgtcgtgattgctaatgctgacctgttgcggatcgtagcgaaactcccgcagccagctcaggtaatcctgatggaagaaaggcaggctggagagatagcggtgttcggcttcggttagcgccaactcgctcatcatggcaacttgcgcgcggatctcgtcggcatattcgcctagcagttcgtcgccacggcaacgaaactccgccgcaacggtaattgcggggtagcgatggaacactgcttgctgcatatgaagcttgtaggcgtcagtatcaagcagtgaagtcaaaatcggggaagcgtatagagtcatatcgcgttacagcatcctcgtcaggcgcgtgtccaaatccggataatcaaaaaagtggggggagtatacccggattatcctgttattgaagcctcatcacaccacaaatggcctgaacgggtcgaggataaaacgtgcctttattttaccgggggcgcaacctcagacagaaaaagccatttaatccaataaactgaatggcttagttgatttactcataaaaattatgaggttaattattttaaacaccgattcagataaaaccggttggcgtataaatactgacccgattgcgcccgctcttcttacaaaaatagagcgcttcgtcggcctgcttgatggctggatgcagttctgccaggttgcctacggcagcgatgccacagctgatggtaaagcgcacccgttttccgttgaccaactccaggcacatctgttgggtttgcttacgcagggcttccatcatgctgcgggcattttccagggaacagtgaccgagcagcagggcaaactcctcaccgccatagcggcaaaagatatcgctggaacggaaggtgttacttaacgactgggcgaacatcaccagcactcggtcgccgacatcgtggccataggtatcgttaagacgcttgaagttatcgatatcgatcagacagaacgccagcggatagctattctgggcgagcatttcacactcgaggaaaaatttgcggcggttataaatgttggtcaacggatcgaagaatgacgagacttccagctctttgattaactgttgcttttcgttttccagcgcgagcttgacctgattgtattgtttgagctgggtgatggcatcactgatggcgatcagctctttgctgtaaaaagcgtcgttgtcatcaatattcgtatcgccttgtgacaggcgcagaatatttttatgcgttttggtcagccagcgggtaatgttggaacagaagatcatggaaggcagcaggatgaacagggcaatcagcccactcagagaaatcatgccgtagatggccgtctggctatcatactttttggcttcggaagcggccatctccagctcaaagctgcgctcatagagtctttgggaaagcttgtccatctcctcgatatagctggcgatcaggttgatgtcatagacggtattgtgggtaatggcttgatatagcccgtctgaaatgctgctgatccggttgttggagatgttacgcagtatctcatccaccagttcggcaatctgcggatcgttataggccagctttaagaacgccaaacgggtaccgagcggggtgaataccccggtcaattggatggccttcagataagcattcttgcgttccaggctgctgagattgacgtcgataatctgatcgatcagttcggtcagcgacatattcagccgattattaaggcgaacagcctccaaaaacagaaaagagtccgcattgatcagccgggtgtcgtaggtatagcggtagaaggctttggtggtctggacgatataataggcgctgttgatattgaacagattgctgttggcagtgtcgacttgtgtgacctggcgggaatcgttatccagtagcctttccatccaatcgagcatggacagtatggcaatcttttgccgaatgcccaggcgcagggcgagatcggcgtcaacattggatttaacaatcgcgattttttcacgcgcctgtttatcggcctgttgccattgggcttgggtgacggatttatccgccaggcctaatctttttaaccggtgtgccagcagcgtagcctgaaaggcctcggccacttctttggttctgctgattttatacagattttccagacttcggtcatagctagcccgggcttttatcagcccattggcgataaaaaccgcaaaagacagcatgatggcaaaggtgaagaaatagatcaggtattttactttcatgccaatccgtttctcctactggctcttggataattatatcattgctagcgctggttttcctccgcaattcggttgccaacggggatggaaccgcgcctgttaaagcataaaatgctgagtttgacgttaagcgaagcgccagggtagctggagcatagcaaacaacagcgaatgtctgcgtgagtcgcgtgatttcttggtgcgatttgctgccatttctgggttttttttatagctgtgatacagtttattcacaatcgggccattgagataccacgtcgtcctgcacggcggtacgctccgagtccgggatctgtaactcactgagacgtcaaagggtttttatgacacaacagccacaggcgaagtatcgccacgattatcgcgccccagattataccatcaccgatatcgacctggattttgaactggatgcagacaccacgcgcgtgaccgccgtcagccagatcaaacggcagggtgccgctggcgccccgttaacgttgaatggcgaagacctgactctggtgagtattcaagtggatgggcagccttggagcgcctatcgtcagcaggaaaaccaactggtcattgaacagctaccggctcagtttaccctgacgatcgtcaacgacattcatccagccaaaaatagcgcgttggaagggttatacctgtctggcgaagcgctgtgtacccaatgcgaggccgaaggcttccgccatatcaccttctatctggatcgcccagacgtgctggcccgttttactacccgcattgttgccgataaagcgcgttacccgttcctgctgtcgaacggcaaccgggtggctgaaggtgacctggcagacggccgtcactgggtacaatggcaggatccgttcccgaaacctagctatctgtttgcgctggtggcgggggatttcgacgtgttgcgtgatagcttcaccacccgttctggtcgtaaggtggccttggagctgtttgtcgatcgcggcaacctggatcgtgccgattgggccatgacctcgctgaaaaactcgatgaagtgggacgaaacccgctttggcctggaatacgatctggatatctacatgatcgtcgccgtggatttcttcaacatgggggcgatggagaacaaagggttaaatatctttaactcgaagtatgtgttggccaaggccgaaaccgccaccgacaaggattacctgaatattgaagcggtgatcggccacgaatatttccataactggaccggcaaccgcgtgacctgccgtgactggttccaacttagcctgaaagaagggctgacggtgttccgcgatcaggagttcagctctgatctgggctcccgttcggtcaaccgcatcgataacgtacgggtgatgcgtggggcgcagtttgccgaagatgccagcccgatggcgcacgcgatccggccggataaagtgatcgagatgaacaacttctacaccttgacggtgtatgagaaaggatccgaagtgatccgcatgctgcatacgttgctgggagaacaacagttccaggcggggatgcagctctatttcgaacgccacgacggcagtgcggccacctgcgatgattttgtacaggcaatggaagatgcttccaacgtcgatctgtcgctgttccgccgctggtacagccagtccggcacgccgctgctgacggtgcgtgatgactatagcgccgaggatcagcaataccgcttgcacgtcagccagaaaaccgcgccgacggccgatcagccagaaaaactgccgttgcatatcccgctggatattgagctttacgacagcgaaggcaacgtcattgccttgcagaaagacggttcaccggtcaataacgtgttgaacgtcaccgccgccgaacagacttttgtgtttgatggcgtcgcgcataagccggttccttcgctgctgcgtgagttctcggcaccggtcaagctggattatccgtacagcgatcagcaactgaccttcctgatgcagcatgcacgcaatgagttttctcgctgggatgccgcgcagagcctgctggccatctacatcaagctgaacgtggccaaatatcagcagaagcagccattgtcgctgccgctgcacgtggcagatgccttccgggcggtgctgctggatgagaagctggatccggccctggccgcgcagatcctcacgctgccatcggaaaacgaaattgccgagctgttcgccattatcgatccacaagccatttcggcggtgcatgaggcgatcacccgttgcctggctaaagagctggccgatgagtggctggcggtgtatcacgctaacaaaaccgaagggtatcgggttgagcacggcgatattgccaagcgttcactgcgtaatatttgcctgcattatctggccttcggcgatgcagagcaggccgacaggctggtggtgcaacagttccagcaggccgacaacatgaccgattcgctggcggcactggcagcggcgatgggggcacagctgccttgccgtgatgccttgatggccgagtttgatgagcgctggcatcacgatggtctggtgatggacaagtggttcatcctccaggccaccagcccggcggcagacgtactcggtaaggtgcgtgcgctgctgcaacaccgttcattcagcctgagtaatccaaaccgcacccgctcgctgattggtggattcgcctcggctaacccggcggcgttccatgcagcagacggcagcggttatcagttcctggtggagatcctcagcgatctgaacaagcgtaacccacaggttgccgcgcggctgattgaacctctgatccgcctgaagcgctatgatgcctctcgtcaggcgttgatgcgtcaggcgctggagcagttaaaagggctggagaacctgtctggcgatctgtttgagaagatcaccaaggcgctagacgcgtaaaaaaataaatatcc

SEQ ID NO: 315 - DNA, 5757 bp, unknown
  Altogen  635822 strain
  misc_feature (62)..(151): n is a, c, g, or t
  misc_feature (211)..(262): n is a, c, g, or t
  misc_feature (329)..(410): n is a, c, g, or t
  misc_feature (582)..(631): n is a, c, g, or t
gacgagcgtggcgcagccaaaaaccgctttgactgtacgcacctgaataagggcggcgcagnnnnnnnnnnnnnnnnnnnnnnnnnnnnnnnnnnnnnnnnnnnnnnnnnnnnnnnnnnnnnnnnnnnnnnnnnnnnnnnnnnnnnnnnnnttatgcgttggacggtgaaatcgaccatgacaccggcaagcccctgcgagatatggctgnnnnnnnnnnnnnnnnnnnnnnnnnnnnnnnnnnnnnnnnnnnnnnnnnnnntaccatgggcgcgtatcgcgagtgccgtgccagttgcctgcgcgggattagcttggctgacaccttnnnnnnnnnnnnnnnnnnnnnnnnnnnnnnnnnnnnnnnnnnnnnnnnnnnnnnnnnnnnnnnnnnnnnnnnnnnnnnnnnnggcaaacgtgccgcgtgacgttcagaccgtgcgggtagctcgcaaggtagccgatgagccgaatgcctacgatgaagaggtacaaaaggtggttggcatcttcgcaccccatcttggccatggtcacgtatttgaaacccgtacaacggaatggcgcattgtccgtaaagcnnnnnnnnnnnnnnnnnnnnnnnnnnnnnnnnnnnnnnnnnnnnnnnnnntggttgagcgagaaccggaacccgttatgcaggtagcaacgcctgagtacgtcacggcggtgatgaagttaatcgagtgcggcaatgttagctgggatgatccagatgtcgccaagacgctgagggaggcgattaggcggcagtcatcgaagggtagcagccaagaacgtcccaaaaaccgcaataaatcgaaaaaaatatgccatcatcacgacttactccggcggagtacgctcggggaccacaaattcggcacgagctagtgcgagtgggtatcactattgagcagtgaaaactgaatgaattgcacaaggggcaacgataacttttgaagactagagattcgaatgtccattactggcagattggacgcatttttcttaatgataattacacaagcataattacctacgcattacttttttattcgcaatgcagatggtaattaactcgcgttagggattgattgcgcttgagttaatgtttttaaggaagcagacaacttgtaacgctgtctgcttccctgtaatcaaaagactatttttcaattgactttatcaatgcgttatataataaattggagaattctctttcatgcctcacctctatgtttgccattccgtttctaaacaacttgaatttaccgctatgttcagaagtggagatcgaaacattcaatctatcaattcttatttttttagaagataactcatcataataatagctaagtaagtttttgctgctagtaacttgcattttggcaagggcgaattcagaaacttgaatttgagaagcatctatttgatgaatggttactaattgaatctttagtatttcctctatccatttcatcggttcgattataatttcttcaatgcttgtcccaaagcctaagttttttactaatgcatttgcaaaaggttttagagttctagggggattaattatgacagctattggataactatcttcgttgaataaaaattcagttgttttatattcaactctctcaataaagctctcctcaccatataatgatgttattttatcctcgtaaactattttctctacaaactttccatttaattggtcttttcttactttgctaagtataaaaccgtgacctttctcttcggtaaaagaatcacttgaaagaatttccgccatggtattcatggggaaaggtgattctattctcaaccatttaactttcctcatattgataacctcattgtttctttatagcattgtaggcgttcattgctgcactttcaatcaaaaggttgatcgcttttttttccatatcactggcagctcgagttgtaatgttatgtttgtcaattttgtaattgtttattcctttgatttgataagagaaatcattacaaagatctgcatttttaaaaaatgcttccacctgaattctatcaccttgaatgatggctggcttggatgcccacgcaatgcggctgatataatatcccttactgtgaagttgggcgaaaatagatgatgaatctactgctgctcctttaagtagaactttttttacgaagctagtatctatttccccatcatcatcgctgttttcttcgtcagataattttattctatttaattcaatatttgttacatcgtcgactttaaaaccgtcaagcccatcaattaattctcgaaaaaattgacttcgtagtgcaggctccgtaatcgcttctaaactcaactcaaatctttcaactggtttgcttgttattactgttagttctttttgtaaaagattaacaagatcttttgatttttgtatttgaggcattctaatatctaccccggtatcagtaatttttagttctaaacttagacttcgtttatcgatttgccttaactcggttcttgaccagtctaaatcttcataatctaaatcaatatcaattgagccatcttttttagttcttattattaatttttcagattttgatgcgtaatgtttttttacaagttcagccgccttttttatctcgtcctgagtgaatgtggtatccagtttagcgtacgtattactttctcttttatcgtatgtttgtactagatcttttattttttgcagatctaaaaaacaaaggggtaaacggcaaacttcctcaatcagcacttccttatctaaatcttcagataccagtattcccttagcaaaaagtatctcatgaagaacttttgatgtgactcttttatggtgtagagcatcaaatatatttttatctgttgcgtaatataaatttttattcttcattttcacgttgctccatgccaatttcttctaagttgaagtcagttactttttttgggatgatttttaaatccatttgtccaaataagcgttcttcctcacctacgagccagtgggtactgtaattccttttggccctttcaaagttgtgtggagcattttcatctggattaatatatgacattctgattcgtattttctttccttgcgtgagtatttggaagcttgatagcatgtcgaaaaaataaacaaactcatcggcgcttgaacctggttgattatagtagactaaatacccttcctctttctcagtttttccccacataaatttatcatgtttaattattatgtaaggagaggtaatcatttctatcgttgctgctgttttagaagtgattgggtgttttattcttgtaagataaagatcagggtagtaataaataaattcatcagggtgtggtaagttacccgtacctatttgagatgtgatgtctgatgatatatttatcatgtcacatatttgataaggatttaacatgtgtaatttaacgctactattattgattactttttttaaatcaatcttactcattatatcttcatagaaattactatcatataaatggtcgtgattatataaaaataaaagccctctaacattataacctaaagccgcatcctcgacatatttagtatgccaatcatcgctggagtttgcacattcgactgcaaggacaagggaggttagtgcttcttcaattttacctttttttatagaacctataccgtaactttttaagtctgtgtttaagtaaacaacctcctcctcataagggtccacataataaaatacaacatcacttgggtgcgtttttttagaatgtgcctgagtgcaacagttataattcatgtcctcacgctttgggcgtttccacttaaaaattgtcaggatttcatcagatatcttgcttgctgtgcgttgaatggtagccatctctccggccataatgtgatccccatcggttttagagttatccaataaaacaaaattacaactttatcggcagaaaatgaaacattatttttagcatttatctactgcatgtattgactgcgtgtatttgcatggaatggttttgttgcggtagccaatgcagcgccagaactggcgcggctttcactgctacatgcaactgcattaaaaccgacccatgaagcgggcaggcggggtggggatagcattgcgcgcagagtgaatttttttttcaaaaaaacaattgatttttcgcgtcgtggcggcgtcgaatttttgaaataaaatgctgggtggggtgaggggttgcatggcgtgactggcgtctgagagcgttaccgcgtggtatagaaaaatcgcctaaattgtatcagctcaggccagatctgacagttaccgcggatagaacacaatcttatctcacagtcggctttgagcgaggagcggacatccaaaccacaaacgtaaagttgaggagcgcgctgcttttggcccgcccctctcgcatactatgctaggccttgtgtgtgaccaaaaagccctcagccgaaagcttgttctcttcaataacaagctcggttacaagggaattgatgttttcccatcgcatacccggagtaaaccttcgaactgctttagtaaacatgcaattcatagtgcgatcgaagagttctacagtcgttcgacgcggatgctgtgccaaactcgacgagaagaaatttttatgcacttggtaatggtgcgaatgaataaattcttgccaacttgaaataagggtgtcttcgtcgcagatgtcaatgaactcaaaatcttcaagattgcgctcgttaactgtcccccaagcatccttcatcagagcaatagcctcaacatcagtctttggagcgctatagccgaagatagttactaaatatgcgcgtttcagcttgttttgaacagccttccagttgtcctgaatgtaaggatctgcggcgtaattcttatgtgtaacaggatagagcagcggagcgggatcaaaaggttcaccgcattcccgacagcatgctgtgataattccaccgtacttgtgcttgcggcaatagcctacaagtacgtttccatgcaggaatgcaagatcgggtaaatccttagtgatctggtaagcgcgttgatacgcctgtaacaacagcggatcccaattgaaagttgcgacaagatccttctttctcagtgccaagagcagcaagtcataaatattcggttcatctgggatctccatttctgaaaaatactcgcgtattcgtctgtctagttcttcccttatggcatcacattcagggcgatggtgaagctcggagtaaatgtcttctaggttgttgctgctagtttgaagactgacttccttgaggatttcagtcattcctagcgattttatgaatccgttcatggcagatgatttcctgccgtttttgtctccgtcaggaatcgcagccattgtcgcgccagcacccaggataacgacatgtggcctgttcttcataaggtgttcatattgatttgctttttcagaactcatatccattcctaatggcctaactatatttagacagcaggcaaaaatgctcccattcttataaagaataatctatccgcatttattatgcgtgagcaatcaaacttttttggtaaacctaaaaatttagtgattagagtcaaagaacaatgatggaatggctgcttttggcacagagttgcctgttagattggctctgtgccgcagccgtgtcaggtcaagtcgcgactaatacacctaaattggcggctgtaggg

SEQ ID NO: 316 - DNA, 332 bp, unknown
  Altogen  635822 strain
ccggcgttaaatttgctgtattggagcggcgctgcatacagatctgtttttttgcgctcctcatttatttcttcaaacttagaaccggtgcctgcaccaacgcctattgagtcgtaaaccacctcggcgccccgcgccagggcagcgctgtaaggccgcttacaactcttcatcagctcatcttctttagccttccactcgtccgcccaataaaccacagagccgtagcggtagacgttcgcgcacttatcctggccactatctgcaacgtcgaaaccaatgcgcttgcggccactcggttcgaacccgagctttttatgcgcatcgatcgc

SEQ ID NO: 317 - DNA, 725 bp, unknown
  Altogen  635822 strain
ccggcttttccctttaaacatccccgactcacatcgctgtggattcagtcctgcataggcgaccagggccttgctgctggtgaaccgccgcaggttccctgcgaaggccagcaggctggaactcagcatctctcctactcctgggatgcttttcaacaggtcgctttcccgcttcaggtctgggttatcatcaaggtgttggctgattttcttcttcgtttctcgtatcaggtcatccaacgtggcgatgtgctcattgagtgaagggacgatgaccgcctctgctacctccagacgattttcttccatctgacgcatctcttcgaggttcttaagatgcctcaccagcgcggtcaactggcgttcactcaacggggctgggaaccacgggtcgggctgatgcagtgcgcagtagcgggctatcatcgctgcatcgcttttgtccgtcttgttccgggtgagttctgtgttgctgaaggaatggatacacgccgggttcatcagactgacgtggtagttgttgtctgccagataagtggccagctccgtgctgtagctcccggtggcctccatgcagacaggacagtcgccaaagcggctcaacccggccgcgaactcgcggcacccagaaggggtattggcaaactttttggttttatacttctgattgtccagcagtacggcgacatcaaacttgagtttggcgatatcaacgccgacagggg

SEQ ID NO: 318 - DNA, 32766 bp, unknown
  Altogen  635822 strain
caaaaagatccagagcacccacgcaaatgttaacagtaatcccgcctggtaataaatcagcgctttgttacatagaacaattaagctgaaccagcccagtataattcctgcgtattttgggctttttgctcgttgtttgcgatgctgaccgcagtccatagcgatgatgaatggcgtgaggtgaaagccaggctggaagttttgctgaagcgctaaactcgtggagcaaacagtggcatgatctcattgggcgcagcatgcagcgcccctataacaacctttcaactccgtgctaaattccccacgccaccgtcgatcagcagttcactgcccaccatgtagctggattcgtcagatgcgaggaatacggcggcttttgccaattccagcgcggtccccatgcggccaatcggcaccagcgcgtggatctcttcgcgcaatgtctgttcagcctgtgccggtaaacccagcttgcccagcgccggagtggacgttggtccagggctaaggccgttgacgcgaataccgcgcgggtgcagctcggcagaaagtgaacgcgccaaagataaaatcccggctttactggcggcatagacgctgctttgcgccaggccaatatgcgcgctgacagaaccacacaggatcaccgaggcgggattgcccagcaacggtaacagggcctggatcaaaaacagtgggcctttgagattggtgttcatcaattggtcatagcgctgttgatcccattcctgtaacggcaggtgggtgacatcaccggcgttgatatacaggatatccagccggggccagcttttagccaactgcgctgccaaaatcctctgttggccgataaccccggcgtcattgtgcaatagcacgacatcccctagcgtttcgccagccgctgttaacccgctagcgctgcgcccggtgatcgccacagtggctccttcggcaataaactgccgggccgtctccagtccgatgccgctggttcccccggtaatcaacgcgtatttacctgttaatcgtgacataacccttcctctcgttggccagttacgccattattggtttgttagtaccttttgcatagtaggtaccgtttggatactaaaagacaaggtgggatgcaatggcgtcaatagtgaaagggcaggtcgaaaaaaatttcccgttaccgcctgcgggagaaccgtgcccgatggtgagcttcgtcaatttgatttcaggcaaatgggcgatcccgatcctgtatcgcctgatggtgatcgacggcccgatacgctttagcgaattacagcgcgcagtggcacccatcgcgcaaaaagagctgacgcgtcagctccgccagtttgaacaatgcggtcttgtcactcggcaggtgtttccacaggtgccaccacgggtggagtaccagataacgcctctgggtaaaacattgcgccccacgttagactcgttggccgattggatgcgtggccatgcgccgcagctgatcggtagctaatcatcgccagtaaactcgtaaggttgagtgattctccatcactcgatacggaaagtgcgcaatcgggttgatagcagtagaatttgtcacgcatactgcgtaaaccaatattttcgctgaacaaggagttccagatggccgaagaaacgattttcagtaaaattattcgccgtgaaatccctgccgatgtggtctaccaggacgaactggtcaccgcatttcgtgatatttccccacaggcaccgacccacatcctgatcgtgccgaacgtactgatcccaacggtgaacgacgtgaccgtggagcacgaggccgcattaggccgtatgatcaccgtggcggccaaaattgccgagcaggaagggattgccgaagacggttaccgcttgctcattaattgcaatcgtcatggcgggcaggaggtctatcatattcatatgcatttagtcggtggccgcgctctgggcccgttattgtcacgttaaccgaggaagaccatgcgctatatccacacgacgcgttacttgatggcgctggtgctccccgccgcgatgctgatggggtgtagcagcccgaagggcatctcggtcaatgaacggcaaacggtagtgatggattcaccggtactgacggcgggtattctggcggataacccgtctattgccgacgcatctggccgcctgcgggccagttcggtgctcagcaacacccagacgacgccggtgcccctccactatcgtttctactggtatgacaaacaggggctggatatcctgccttttgaaaagccgcgcacggtcaccgttgccgccaattcagacaccgagatttattcgttgaatggcaaccttgatgccaagcgtgtacgtctgtatttatacttataagttttgggttacgttggagaaggtaatgaaaaagttcctatgggtggcgctggccgcgttggtgttaaccggttgtccatcacgcccaccagagcctacggcaccggtgactgtcgagccacagccgcaaccagagcctcagcctgaaccgttgccaccaaccaccgaaccggtgccacagccgccgaagatccagcagcttgattggctgggtagcgtacagccgttggtcaatcagatgctgaaggctgatggcgtcacgcctggcagcgtattgctgttggacagcgtgaaaaacaataccaatggctcattgagcatcggcaacgccacctcggcgctgcatcaggctttggcatccaacaacacctttgccgtcgtgccggaagcgcagttggcgagcgccaaacagacgctgggcctgtcggcggaagacagcctcggatcgcgcagcaaggcgattggcctggcgcgcatcgtcaatgcgcaatacgtgttgtatagcgacgtcagtggcgatgtgaagtcaccggcgatggaaatgcaactgatgctggtacaaaccggtgagatcgtctggtcaggcaatggcgacgtcaaatactgaatcccagctgcggcgactcttgagtaacaggctgccggcggtaaataccgccggttgtcattttagccaggtacaagggttgagcggcgagagctggcgggtcgacggtggtgatgtgcaactgctggcccgtccgcagacgcctgaaaaacgcatgctcggcgttaaccgtcggcgtgaggggcaagtgctcaagcgcgctggattaggcatggggccaaaggtatggttacagagccctgagtggttgatcgtcgaatggcttgccggtgagagcgttgacgaaacggcgtttgcttccttaacggccaacggggaactggcagagctgacagcacggttgcataaccgtgggttgagtggttaccggctggatctgcaacagcaatttacccgctattggcagcaaattgatcgccggcggatcacgccagcctggctgcgttggcagcgctatttcatcaacggcaccatgccgcgaccgttgcagttggcaacgctgcacatggatattcatgccggtaatctgctgcgacaggccggtcagctcaggctgatcgactgggagtatgccgccgatggcgatatcgcccttgagctggcggcgatgtttcgcttcaatcaattttccccggctgtgcaacaacgctttttagagcaataccaaccccacggctatgccgatttgccgcagctggcctcacaggttcagcgttggttgccgtgggtggattacctgatgctgatgtggtgcgaagtgcgctggcagcagtgtcgggatgcggaatttttgcgttggggcgcagcgttataccggcgtttttgtttatcatcgtcaaattaatcatgaatactgatgtgaggtggccgtgggcccagtaatgctagatgtcgtcggctatgagctggacgcagaagaacgcgagattttaaaacacccgctggtagggggcttgatcctgtttacccgcaactttgccgatccgcagcagttgcgtgagctggttcgccaaatccgcgcggcctcgcattcgcggctggtggtggcggtggatcaggaaggcgggcgcgtacagcgctttcgcgaaggttttacccgcttaccggcggcgcagtcctttgcggcgctcaacgatgctcaggaaggcgggcgtctggctcaggaagccgggtggctgatggcctcggaaatgattgcccaggatatcgatatcagctttgccccggtattggacatcggccacgccagcgcggcgattggcgagcgttctttccatagcgatccgcagcaggcgttagtgatggccgaacgctttatccaggggatgcacagcgccgggatgaaaaccaccggcaagcatttcccagggcatggcgcagtcacggcggactcgcataaagaaacgcctcgcgatccaaggccattggctcaaatccgcgaacatgatatgactatcttccgtgagctgatccaacgcggattgctggatgccatcatgccagcccacgttatctatactgaagcagacccgcgcccggccagcggctcgccttactggctgcagcaaattttgcgtcaggagctaggctttgagggcgtgatcttctctgacgatctgtcgatggaaggggcggcgatcatgggcagctatgccgaacgtggccaggcggcgctcgatgccggttgcgatatgatcctggtttgtaataatcgggcaggggcggtcagcgtgttagataacctgtccccggtcaaagtagagaaattgcagcggttatatcatcgcggtcagttcacccgtcaggaactgcgcgattccgaccgttggcaaaaggcgcatcatgcgctgagtcaattgcatgaacgctgggaagagcataagcaacgctcagcggggtgaacggccagggcgccgcaagaaggcggcgttaataatgggggctgccagcggcccccagcttgttgcgaggaaccacatgattatctatttgcatggcttcgattccaccagtcccggcaatcatgaaaagattatgcagttacagttcatcgatccggacgtgcgctttatcagctacagcactttgcatccgcgccatgatatgcagcatttattgaaagaggtggacaaggcggttcagcaggaaggggatgcccatccattgatctgcggtgtgggtcttgggggcttttgggctgaacgtatcggttttttgtgcggcatccgtcaggtgatcttcaacccgaacctgtacccggaagaacatatgcacggcaagatcgaccggccggaagagtatcgtgatatcgccaccaaatgcgtggaagatttccgtgagaagaaccgcgatcgctgcctggtggtgctttctcgccaggacgaagtgttggacagccagcgtagtgctgagttgctgcacaagtattatgaaatcgtctgggatgaacagcagagtcacaagtttaaaaacatctcgccgcacttgcaacgcatcaaagcgttcaagacattggcgtaacagttttataacgcattattgagccgtgaacgctgttccccaagggcagcaattgcggcttttttgtttttatcgtgcccgttttcgccagtggacagcaaaatgtaaaactgtgatctcacgctaactatttgaatcacaatcctcaaaaaatcccttcgtccagcctttaaccaaaaaactttgacgtacatcaattttggtatgaccaaataacctctcgtgctattctggccccagattgcaggtttaacttaagcgaaccctatgtattctaaggatattatttatttacccttaggcaacaattggttcacattcagggggtcattttgacaacgccaaagaaaaaaattgttattgtcggcggtggtgccggtggtctggagctggcaaccagcctgggccataaactgggtcgtaagcacaaagcggagatcacgctggtggatcgcaaccacagccatctgtggaagccgttgctgcatgaagtggctaccggctccttggatgacggtgtggatgcgttgaactacctggcgcatgcgcgtaatcacttcttcaacttccaactgggttcactggtcaacattgaccgtgaaaagaaaacgctgcagttaacgcagatctgcgatgagcaaggctgccagctggttcccgcccgcgagttaagctacgacatcctggtgatggcgctcggcagcacctcgaacgactttggcaccccaggggtaagagataactgcatcttcctggataacccgaatcaggcgcaccgtttccataacgagatgttgaacctgttcctcaagttctctgccaatccggaagagaaggagagcgtgaatattgccatcgtgggcggtggggctaccggcgttgagctgtcggcagaactgcataatgcggtcaaacagctgcacagctacggctttgaagggctggataacagcgccttgaaggttaccctggttgaagccggtgagcgcattctgccagctctgccgccgcgtatttccgcagcggcgcaccaggaactgaacaagcttggcgtacgcgtattaaccaataccatggtgaccagtgccgatgagcatggcctgaacactaaaggcggcgaatttatcaatgccgatctgatggtgtgggcggcgggcatcaaggcaccagactttatgaaagagattgctgggctggaaaccaaccgcatcaatcagctggtagttgagccaacgttgcaaaccacccgtgatgccaacatctttgctatcggtgactgcgcttcctgcccacgtgaaggcggcggctttgtgccacctcgggcacagtctgctcaccagatggcatcacgttgctatagcaacatcctggcgatgatgcacgatcagccgatgaagccttacgtttataaggatcacggttcactggtctcgctttcccgcttcagtaccgtaggtagcctgatgggcaacctgatgcgcggttcaatgatggtcgaagggcgtatcgcccgcgtggtgtatatttcgctgtaccgtatgcaccaggtagcgctgcacggctataccaaaaccggcctgatgatgctggtgggtggtatcaaccgcgtgatccgtccgcgcttgaagatgcactaatttttttaacccattcgttcggttgatgaaaacccacgtaggcttgccgcgtgggttttttattgccgtgagatcagtaggttgccagactgcgcccctaagaacggagtgtgcgactttcaccgcactcaattcactgacattttaatacattgttcaatggcatcggggagcgagtcaccaccttgttaagaattgactaatcaaatattgggctatagtaactgtggccctacagagaaagtatcgccgttgacatactctttaaagcccacgattaacttcatagttcacaaaacatggttgctgtttttgagccataaaatgtcacttataaaacaggtgttaagatgatgaataaagtgtcactcgcgattgaaattcaaaaagacgctttttccaaacacaagtttttcactcatatccgcaatgcaacacttccgcttgaggaacgactttcttttctacctggcatgtcacattttattatgagtttcggagacataaataaatatgtgctaccttttgcttcccctaagaatgaacttgaagacgcgatcaataaacatgcgaaggaggactcgaatcattggccttggtacataactgacctgcaacagctagacatgaacaaaagtcgtcccttcaccgaaacactacaatacctctggtcagaggagctttcggcaagccgaaaactgacttacgacctcatagagttaatagcgggtaaagatgccaaatcaagattggtcattattgaagtgatggaggcaacgggaaacatcatgttcacaactctgaatgagataactagtggaaccagtttaaaactggaattttgtggttccctgcatgcaagccatgaatcaggacacacaatgggagccgatgatgaaatcataaaccggctcattttcactgaggatgaatgtcagtattttacatcactcattaatgatggatttaaagcgtttgtccgctttatcgatcagctttatgacggtatcgaagcagcaaaatttcggtaaggaatcgacacgtctttacccatgttcaccgtatacactgccgatttttccaacacagcggtttgattccgcacccatgcctcacggttttcgattcgtgaacaacgggtatggttaagattcttcttaattcattggttttggcccgctttcatcgcattttgctcacggagtcttattgcgaggctgaatttccttgtgcagactttagggcgtttacagacggcgcgtcacgcacgccgtaaaccggggggattgcctatgattgaggcgagcttgcccggtgcataatgcgtggtaacacattcaggaggatttcctgtgaacaaatcaatgttagccggtgttgggattggtattgcagccgctctgggaattgctgccgtggccggtctggacgtatttactcccggcccacaatatgcgcaggttctcgccgcaacaccgatcaaagaaaccatcaagaccccacgccaggagtgccggaatgtcacggtgacccatcgtgcgccagttcaggatgaaaaccgcatcgctggctcagtgctgggggcggtggccgggggggttattggtcaccagtttggcggcggccgtggccgtgatgttgcgaccgtggtgggtgcgctgggtggtgggtatgctggtcaccaggtgcagggtgccatgcaggataacgataccaccaccagcacgcagcagcgctgtaaaacggtgtatgacaaatcgcagaaaatgctgggctatgacgtgacttacaaaattggcaaccaacagggtaaaatccgcatggatcacgatccaggcacccagatcccgctggataaaagcggtcagttgatactgaccaaggtctgatcttcgccatttactcctaacaacaaccctctcccaaagggagagggtgaggggacattggtcatcaagctggcaaagtatgctctctgaacgctgccagcagttcgccgataaacttcaagcgttcggcccggtcgccaagatccaacataaacttcagcttggttggcccatccaggcggtaaacctgcggtttgctttgcagcaagccaatcagataacccggatcgacccggttcttctcaccaaactcgataaagcccccgcgctcgttgccttcgatacgcttgatccccagtaactgcgcctgttgacgcattgccgcgctttgcagcagattacgtgctgcatccggcagcaggccaaagcggtcgatcagctcaaccttcagttcctccagttcaccctcatttttagcgctggcaatgcgtttatagaaggacaaacgagtattcacgtccgggataaagtcgtcgggcagcagcgctggcatgcgcagctccacttccgtctgattgctggtgagatcttccagcgaaggctcacgcccgttcttcagggcgtcgacggcgctttccaacagctccatatacagcgagaagcccacggtggtcatctggccgctttggtcctctcccagcagttccccagcaccacggatttccaaatcgtgggtagcgagcgcgaatccggcccccaaatcttccagcgtggcaatcgcctccaaccgcttgtgtgcgtcggtgctcatgaccttcgggtttggcgttaacagataagcataggcctgatggtgagaacgcccgacgcggccacgcagttgatgcaactgcgccaagccaaagcggtcggcccgttcgataatgatggtattggcgctggggatatcgatgccggtttcgataatggtggtacagaccagcacgttgaagcgctggtggtggaaatcattcatcacccgttccagatcgcgttcccgcatctggccgtggccaatggcaatccgcgcttccggcaccagctccgccaagcgttcggcggctttatcgatattctcgacgtcgttgtacaggtaatacacctggccgccgcgcagtacctcacgcaggatggcctcgcgcaccaccaggctgtcgtactcgcggacaaaggttttcactgccagacggcgggccggtggggtagcaatgatcgacagatcgcgcatgccgctcatggccatattcagggtgcgcgggattggcgtggcggtcagcgtcaggatatcaacgtcggcccgcattgccttgatacgctctttgtggcgtacgccaaagcggtgttcttcatcgacaaccaacagccccagatctttccagcgcagatcgctctgcaatagcttatgggtaccaatgaggatatcgactttgccttcggccgcctcttccaggatctgttgctgctctttggcactgcgaaaacgcgacatcatttcgatgcggattggccaggtggcaaagcgatctcggaagttgtcgaagtgctgctgcgctaacagggtcgtcggcaccaggaccgcgacctgcttaccgttctcgacggccaggaaggcggcacgcatcgccacttcagttttaccaaagccgacgtcgccgcacaccagacgatccatcgccaatggctggcacatatcgctcagcaccgcgttgatggcctgttcctgatctggcgtggtctcaaacgggaaggtctggcaaaacagttgatactggtcacgattatgcttgaacgcaaaaccgctcttggcggcacgttgggcgtaaatgtccaacagctcggcggccacgtcacgcacgcgttcggcggctttctgcctggctcgagaccagacatccccgccgagccggtgcagtggggcgttttcgtcggctccaccggcatagcggctgatcaggtgcagggaagagaccggcacgtacagtttgtcctcaccggcgtaggagaggatcaggtattccgctttaatgcccccggcttccagcgtcgtcaggccaacgtagcggccaacgccgtgttccagatgcaccaccggttgccctgggtgcagctctgccaggttgcggatcagggtatcggtattgatggtgcggcgattatcctgccgacggcggctgacgcgctcaccgagcagatcgctttcacaaatcaacgcccggtcacgcagcgtatccaggaagccacgctcggaggcaccgaccatcatgtagcggcccgatgcgtcgacctcatccagatgatggatcaggctggtactcagcttgatgcggccaagcagatcttgcagggtttcgcggcggccttcactctctactgagaagaccacgcccccggtgaagctttcaataaagcgtcgcagattatccagtggggccttctgctgggcctggacggcgagatccggcagggtttgatagcccaggttggtgcaaccggctttggcgggcagttcctcggttttcaacgccattcgcggccaggctttcagctcggcaaatagcgcatcgacccgtagccacagggtctccggagccagcagcggtcgcatcggatcgatccgccggttctcatagcgttgattgacatcaagccagaaacgctcggcggcgccttccaggttaccggtgttgacgagcagcgtattggctggcagatagctgaataaggaaggcagcggctggctgaaaaacaacggttgccagtattcgataccggcaggccaggtgcctttactcacttgctgataaatatgttcggcgtcgcggcgtacttcaaactgttcacgccactggctgcggaacagctcaatggcggccttatcggtcgggaactcgtgggctggcagcaggttgatggcttccacttcgctcaatgtgcgttggttatccacatcaaaggtgcgcaggctgtcgatctcgtcgtcaaaaaagtcgatgcgataaggttcttcgctgcccatgggatacaaatccagcaacgcaccgcgcgtagcaaattcgccatgttccatcacctgatcgacgctgcggtaaccggcctgttccaactgtgcccgcagcagatcccgcgacagccgttggccctttttcatcaccaacgcatggccatgcaggaactcatgcgggcagacgcgttgcatcaacgtattcaccggcaaaatgatgatgccgcgtgccatggtcggcagatgatacaggctggaaagccgcgccgagatgatttcctgatggggcgagaagctgtcgtatggcagcgtttcccagtcggaaagggtggtcaccatctgatcggtaaactgctggatttcgtcacgcaaccgcaacgcattttgcatatccggggcgatgagcatcaccgggcctggatggcgttcggcgatttccgcacattcaacggcacaggcagagccggtgagttgccctagctggcgtaaatcgcccgcacggtcaggaagagagtaacggtaggacgatgcggagctgcggcttttatcagaaatgctcattcagttatctttaatcaatgaattgaataacagtttttgtggtgttcaccgtggcgcttgacgtgtgaataccacaaaatcctgtttacctggcctttggccaaagctaacccgttccccctcaccctaaccctctccccaaggagagggagctggaacggtgttgcgattaggaacggagtatggctgtggcacattcggtaccctctccttctgggagagggttagggtgaggggaccatcaagtggttcaagcccatcaccttttaccttggttatactagcctagcagcttataaactgacactggtaaaagcgcgagcaagcttcctgttggcggtaatttaatcaattctgtgccatggcgagatactggccgattttatcgacgtccacgttgccaccgctgacgatcaccccgacttttttgccctgcagatcgatgacctgattcatcgccgcagcggcagccaggcaaccggtcggttcgactaccatcttcatccgctccataaagaaacgcatttgctggcatagctgttggtcggtcaccgtcaggatatcttccacatagtgttgaatgatcgggaaggtgagattgcccacttgctgggtttgcgcgccgtcggcaatggtttttggtaccgggatccacactttttcaccgctgcggaacgcctgttgcacatcgttgcccgcttcgggttcgacgccaaatacccggcaaccgggcgaccagtgatgtgccgcaacggcgcatccagagagcaatccgccgccaccggtacaaaccagcagaatatccaacgggccaacttcttcgatcagctctttagctgcggtgccttggcctgccatcacctgcggataatcgtaaggtgggatcaccgttaagccctgttccgccgctaaccgttgggtgatcgcttcccggtcttcggtttgccgctgatagatcaccacgttagctccgtagccgcgggttgccgccagcttggcggcgggggcgtcatgtggcatcacaatggtgacgttcaccccaagctcacgggccgccaacgccatggcctgcgcatgattaccggatgagaaggctatcactccggcctggcgctgggccggagccaattggctgatggcgttataggcaccacggaatttaaaggccccaatgcgctggaaattctcgcacttgaaaaagagctgggcaccggcgatctcatccgcctggcgggaagtcattaccggtgtgcggatcgcgtggttttgcaggatttcggccgctttggcaatatcggcggcggtgatgcagtggggcttaacggtcatggctacctcatgtggttggcattgattcgttcagtctattaatttgcccgttgtaaacggattgtcaaacggttaaacggctgtcagcggaaacaaccgtgtcttcaggatgttcaaaatcaggcattttctgtaaacccgtgcaaacatgatgaataaaaccggccgggtggttccataaacccggtagagcctttattatccttgatcactttgcttaagctacggcaacaaaacggatttcatgtatcaacctgtcgcgttatttattggcctgcgttatatgcgcgggcgagcctcagaccgctttgggcggtttgtttcctggctatccaccattggcattacgctgggggtgatggcgctggtgacggtgctttcagtgatgaatggcttcgagaaagatctcgaaaacaacatcctggggttcatgccgcaggcgctgatcaccagtaaacagggctccatcaaccctgaacagctgccagcctctgccgtgcaaaacctgcatggtgtcacccgagtcactccgttgactaccggcgatgtggtgctgcaaagtgctcgcagcgtggccgttggcgtcatgttgggggttgacccgcagcagcccgacccgctgacgccttatctggtcaacgttcaacagcaacagctgcaaccgggtgagtacaacctgattatcggtgaacagcttgccgggcagttaggggtcaagcgtggcgatcaactgcgtctgatggtgcctagcgccagccagttcaccccgatgggtcgcatcccgagccaacgtttattcaccgtgattggcaccttccacgccaatagcgaagtggacggttatcagctgctggcgaaccagcaagatgcttcacgcctgatgcgctacccggcgggcaatatcaccggttggcgcttgttcctgcaacagccgttgacggtggacacccttagccagcaaacgctgccggaaggtacccagtggaaagactggcgcgaacgcaagggtgagttgttccaggcggtgcgcatggagaaaaacatgatggggctgttgctcagcctgatcgtggcggtggcggcattcaatattattacctcgctgggcctgttggtgatggagaagcaaggcgaagtggccattctgcaaaccctgggcctgacgcggcggcagatcatgtcggtctttatggtgcagggggccagcgccgggattatcggctcgctcctgggaacgctgttaggcgttctgcttgccaccaatctgaacaacctgatgccgatccttggcgcgttgatcgacggggcttctctgccggtggcggttgaccctatccaggtgacgatcattgccgtagtggcgatggcggtctcgctgttatccacgctttacccttcatggcgcgctgccgccgtacaacccgctgaggctttacgttatgagtaaccatcctttattgcagtgtgagcgcctgtgtaaaacctatcaggaaggcaacctgcataccgacgtgctgcgcaatgtcagttttgccatgcaaccgggcgagatgatggcgatcgtcggcagctcgggttccggtaaaagtactttgctgcacctgctgggggggctggattcacccacctcgggtgaggtgatctacaaagggcagtcgttgaacaagctttcttccactgccaaagctgaactgcgcaatcgtcagctcggctttatctatcagtttcatcatctgctgccggatttcaccgcgttggagaacgccgcgatgccgctgctgatcggcggcatgaaaccggcgctggcgaaggaaaaggcgctggagatgctggcggccgtgggcctggaaaaacgtagcaaacatcgcccgtccgagctctccggcggtgaacgtcagcgcgtggcgattgcccgggcattggtgaataacccttcgctggtattggcggatgagcctaccggcaacctggataaacgcaccgcagacagcatcttcgatttgctgggcgaattgaacgtacgccagggtaccgcatttttggtggtcacccacgatctgcaactcgctaaacgcctgagccgccagttggaaatggcagacggccatctacaggcacaactgaccctgatgggggccgagtaatgagcgcttcgccactttcattgctgatggcgctgcgctttagccgtggccggcggcgcggcggcatggtttcgttgatctcggtgatctccaccatcggcatcgcgctgggcgtggcggtgctgatcgtggggctgagcgcaatgaacggcttcgaacgtgaactgcagaaccgtattctggcggtggtgccgcacggtgagatcgaaccggtcaagcaaccgttcaccggctggccggagatcctgcaacgggtcgaaaaggtaccgggcattctggcagcggcaccctatatcaactttaccgggctgatggaaaatggtgctcagctacgtgccgtgcaggtaaaaggggtcgatcctgcgcaggaaaaacagcttagcgcgctgccgagttatgtgcagggcgatgcctgggctaacttcaaaagcggtgagcagcaggtgatcctgggcaaaggggtggctgacgctctgggcgtgaagcagggctcatatgtcacggtgatgatccccaatagcgatcctgagatgaaactgttgcagccgaagcgtattcgcctgcatgtcaccggtattctgcaacttagcggccagctcgatcacagtctggccatggtgccgttggcggatgcccagcaatatctggatatgggtgacagtgtcaccggcatcgccatcaaggtcaacgacgtgttcgccgctaacaagctggtacgtgacgccggggaagtcgctgatgccaccgtctatatcaagagctggattggcacctacggctttatgtatcgcgacattcagatgatccgcgccatcatgtatctggcgatggtgctggtgataggcgtggcctgtttcaacatcgtttccactctggttatggcggtgaaggacaagagcggcgacattgccgtgctgcgtacgctgggggccaaagacggctttattcgcgccatctttgtctggtatggcctgttggctgggctggtaggtagccttagtggggtagtggttggagtgattgcctcgctacagctgaccaatatcatgaaaggtatcgaaaagctgatgggccattctttcctgtctggcgacatctactttatcgatttcctgccgtccgagctgcactggcttgacgtggcgatcgtactgggtacggcaatcgtgcttagcctactggccagttggtatccggccagacgtgccagccgcatcgatccggcccgcgtattgagcgggcagtaataaaaacctggggccagtagcgggccccatttttttaccctgagggcgagttatgtactacggtttcgacatgggcggcaccaagattgaacttggggtgttcgacgccaatctgcaacgtatctggcaaaagcgggtgccgacgccgcgtgacgactaccggcaactgctggcggtattacgcgatctcacccatgaggccgatgccgtctgtggtacgcaagggctggtgggcataggtattcccggcctgccaaatgaagatggcaccttgtttaccgccaacgtcccggccgcgatggggcagccgctgcctcgcgatctgagcgcgctgattggccgtgaggtcaaggtcgataacgacgccaactgcttcacgctctcggaagcttgggacgaagagtttcgccattacccgacggtgctgggcatcatcctgggtaccggagttggtggtggtttgatcgttaatggtaaagtggtctctgggcgtaactttatcaccggagagtttggccatttccgcttgcctgtggatgcgctggaggtgctcgggcgtgatattcctcgcgttccctgtggctgcggccatgacggttgcatcgagaattacatctctggccgcggatttgagtggatgtacgcgcatttttatcaacaacggttgccagcgcagcaaatcattgcgcattatcaggccggtgaaccacaggctgtagcgcacgtagaacgttttctggatgtcctggccatttgcctgggcaacctgctgaccatcatcgacccccacctggtggtgattggcggcggcttatcgaattttgccgcaatttatcaggcgttgcccctgcgtttgcccgcccatttgttacgggtagccaaactgccacgcatcgagaaggcacgctatggcgatgctggcggtgttcgtggggcagcgttcctcaatttggtggaaagtcataaataaggagagttcatgcacactcgccatcggttgtgtcagtttcgcaagagtaagcatgtgcggcatcagcgttttcgctcgcggatattccaacgcgataccatggcggcggcagagctgaaaaagccgtttgtcgtggtgctgacgggggctgggatctctgccgagtctggcatccgtactttccgcgctgccgatgggctgtgggaagagcacaaggtggaagatgtcgccaccctggacggttttcagcgcgatcctgccttggtgcaggagttttataatgcgcgccgtcgtcaactgcagcagtcagatatcggccctaatgcggcccaccgtgcgctggctgatttggaagagtggctgggggaggagaacttcctgctggtcacgcagaatatcgacaacttgcaggagcgagccggtagcaagcaggtgttgcatatgcatggtgagctgctgaaagtacgctgcaccagctccgggcaggtggtggaatggttgggcgatctgagtgtggatgaacgttgccactgctgccagttccctgcgcctctgcggccccacgtggtgtggtttggtgaaatgccgctggggatggatgagatttacgccgcgttggccaaggccgatttctttatcgcgattggcacctctggcaatgtttacccggcggcaggttttgttcacgaggcacggttgggtggggcttataccatggagctgaaccttgagccgagcctggtggaaagccagttcgaagagaagcattacggcccggccagcgaagtggtgccacgctttgtgcacaagttcctgatgggcaaggtcgagcgggcggataagccgtagcaggaggttggggggagattgatgcttgcccctcactctacccctcttctacagggagagaggaccgatcgagtacgctatcagttgtagaaactgacctggacatgggggacacagattaaacgcgagatctggccatggcactgtaccagttccctctccctgtgggagagggaactggtgaggggatcagcgaccggcttttagctgctggaagtaggtctcatacagcgtactggtatcgcccacatcgttttgccattcaccgttctcaatcaccgcattatctggatacagcgatttgtcgttggcgatctccttcggcaacagctttctcgcggccagattgggggtagggtaaccgatggtttccgccacctgtactgcgatctccgggcgtagcaggaagtcgatcagcttcaacgctccctcgacgttcttggcattcgccggaatagccaggctatccatccagaaaataccgccttctttcggccagacgatctccagtggggtaccagcctggcgtgcgacataggccgaaccgttccacaccatgcccagatcgacttcgccttccatatacggattgccggggttatcagagttaaacgccagtacgtttggcatcagcgtcttgagctcgttataggcagcctcgatctgttcaggatcggtggtattgcccgaataacccaacttgcgcagcgcgacctggaacacttcacgtgcatcatcggtgagcaacacgcggcctttgtattccggcttccacagatcggcccaggcggttacggtattggcatcaatggcatccgtattgacaccaatggcggttgcgccccagatatagggaatggagtaatcgttgttgggatcgaacggcttgtgcaacaggttgggatcgagatcgttaaagtggctgagtttgcttttgtcgatcttttgcagcatcccttccttgctcatcttggcgatgaaataggtagaagggactaccagatcgtacgcgccgtcccggtaggttttcaacttggcgtacatgctttcgttggattcataggtggagtaaatcaccttgataccggtttctttggtgaactgttccagcagccccggcgggacatactcggtccagttgtagaaatagagcgttttgccgtcgtccgcggcgtttgccgagccaaggctcagtgccatcatcccggctgcgagcagatgtgaccactttttcatggtacggatcctttagcagtgcgtgtttttacagtatagcgtgatgcgccataccccagagagcggccattataggtggcgtacccagtggggtaaaggcgcttatcccattggcaaatcagtgtttttgccgatcgcgcaacagcagttggctggtcagtaccagcgctagcgataacaccagcagaatggtcgccagggcgttcacctcaggcgaaacgccgaccttcaccatcgaatagatcttcaagggcaaaatctcgtagcttggcccggtcacgaacgaagagaccacgacatcatccatcgacagcgtgaagcttagcagccaactggcggcaacggcaggcatcgccagcggcaggatgattttgcgcaggatcaccatttcgctggcacccagatcgcgtgcagcctccagcatcttgacgtcaaagcccttcaggcgcgcatagacggtgacgaccacaaagggcaggcagaaggtgatatgcgaaaacagcagcgaccaaaagcccaacgagacccccagcagcataaacagcaccagcagcgagatggccatcacgatatctggcgacatcatcaccacaaacagcatgccaccgacgaagggtttcccgcgaaaacgatagcgatacaatgccaccgccgccaaagagccgatcatggtcgcaaagctggcggacagcactgccatggtcagtgaatgccccgcggcctgcaacaggctgtcgttgttcattaacatgctgtaccagtgggtggtaaaaccctgccagttgatgccaaagcgcgaggtgttgaacgagttaacgatcaggatcacgatgggaatatagagataggcgtaaatcaggctcataaagccaccgcgcaacaggcgtccgatcattccagttccccctttttgttcagcagcttggcggcccggtaatagatccacagcatcagccccatcaccagcgtcaggcaaatgctggtggcggcaccaaacggccagtcacggatattcaggaactggctcttgatgacgttaccgatcagcaggtttttggctccgcccatcaagtcggccacgtagaacagccccatagcgggcagcagcaccaacaggcaaccggcgataatgcctggcatagtcagcggaatgatgatgcggataaaggtttgcagcttgctggccccgagatcgcgggccgcttccaggcaggatttatccagcttctccaggctggagtagagcggcatcaccataaatggcagcaagatatagaccagccctagcaccactgcgccagaggtatacataatgcgtaacggagtatcgatgatcccggcccacagcaagaactcattcagatagccgcgagtgctgagaaacagtttcaggccatagatacggatcagcgagttggtccagaagggcacaatcagcaggaacagcagcagcgggcgcaccctttgcggcagacgggccagaataaaagcgaaggggtaacccagcagcaggcagcacaaggtggcgatcgccgccatgttcagcgagtgcagcatcacctgggcatacaggggatcaaacagccgggtgtaattatccagagtgaacaccatctgcaccagattggcgtcgtcacgggtgaggaaactggtaccgataatcatcagattcggcagaaaaacaaacagcaccagccagccaacggtgccgctgatcaccaggttttgcagcaaattacgcgatttcttcatcggccagcacgacctcccagcttgcaacccaggttatcgccatcttctggtttaacgagtggtcaaagtcaggatcgtcttcattgaagaactcgctgaccatcaccattttaccgttttccagttcaactaccgactctagcgtcatgcctttatagttgcgttcgcgcacgtagccgatcaggccatctatctgctcgctgtcgttcacctcttcgacgcgcagatcttccgggcgcagcagaactttcagggattgcccaggctcgaccgggagatcggcgtagatatcacactcacggccttctacacgagcgcgcacccgctgcggatcgatacgatgtagcactaccgcatcaaagatattgatctcaccgataaagctggcgacaaacaggttcttgggctcttcgtagatttcccgtggggtaccgtcttgttctattcgcccgtcgcgcatcaccacaatccgatcggacatggtcagcgcctcttcctgatcgtgcgtgacgaacacaaaggtgatgcccaactggcgctgtagcgctttcaactcgttctgcatctgcttgcgcagcttgtagtccagtgccgaaagcgactcgtcgagcagcaacagtttaggtttattcaccacggcccgggcaatcgcgacccgttgctgttgcccaccagacagttgatgcgggcggcgctgagcgaactcgtccaattgcaccatgcgcagggcttcctccacgcgcggcgttaactccgcctctggggttttctgcatgcgcaggccaaaggcgacattttcaaacacggtcatatgggggaatagggcatagctttgaaacacggtgttaacgtgccgatgctcggccgggatggcggtgatgtcttgcccgtcgagcacaatctgcccgtggtcggcattttccaacccggcaatcagccgcagcacggtggttttcccgcagccggaagggccaagcagggtgaggaattcaccatcgttaatctcaaggttgagatcgcggatgatctctttgccgtcaaaacttttactcagggcgttcagtgtaaccagagaggatcgttcagtcattttagtgtctctatcccgtacggtggtgcagatagaaccgccgctggaaaagactgcgcgagcttacgggagtgacccgtcaggtactgaagctcaaagccagcggcgccgatcaaaaatttaagagcgcgcatgatagacgctgaatcaggtaattgaaagccaaacagcccataagtcatgccaattggccgatttttgcgtcggtagttaccctattaaaccatcacttgctttaatgatttgtgttaaatctgattattaatgacctgtctcaatatttgatccggatcggttccgcataatgaaacgcgaaattctgagggcggaaccatggataaactactagatcgcttttttaactacgtctcatttgacacacaggctaaagcgaacgtcaaacatgtgcctagtaccgaagggcaactgaagctggcgcgtgcgttgcaacaggaaatgattgggctggggtttgaacgggtatcgctaagcgaacatggctgcgtgatgggtacgctgcctggcaatgtgagctggccagtgccggccattggctttatttctcaccttgatacctcacccgatttttcgggtaagcatgtgacaccgcagatagtggaaaactatcgcggtggtgacattgccttgggcatcggtgatgaagtgttatcgccggtgatgttcccgatcttgcatcagatgctggggcaaacgctgatcactaccgacggcaaaacgctgttgggggccgacgataaagccgggattgccgagatcttgaccgcgatggtgcggctaaagcagcaaaaaatacctcacggcgatatccgcgtggcgttcacgccggatgaagaagtgggcaagggagcgcatttctttgacgttgccgcgtttgatgccgcatgggcttacaccgtcgatggtggtggagttggtgagctggagtgtgaaaacttcaatgcggcagcggtgacggtgaaaatcgtcggtaataacgtacatcccggcagtgccaaaggggtgatggtgaacgcgttgtcgttggcaacccgtttccaacaggcgttacccgccgaggaaacaccggagcatactgaggggtatcagggcttttaccatctcaacagcatcaaggggaacgttgaacgtgccgagatgcactacatcctgcgggattttgagcgtgaaggttttgaggcacgcaagcgcaagatgattgaagttgcacaaaaagttggccgtgggttaccacgggattgctacattgaggtggcgattgaggataattactacaacatgcgggagcaggtggccgagcatcctcatgtgatcgagttggcacagcaggcgatgcgggactgcgatattgagccggtgatgaagccgatccgcggtggcaccgatggtgcacagctgtccttcaaggggctgccttgtccaaacctgtttaccggcggctataacttccatggcaagcatgagtttattacgctggaagggatggagcaggcggtagcggtgattatgcgcattgctactctgagcgccgagcgcgctaaacggtagttttttgctttaacaaaggcccctcaccctaaccctctcccaaagggcgaggggaccgaatgtgctaccacttggctttggtactcagcctagacctcaacggcgctacagattagttactgtgtcagacgacaacgccataccagctccctctccctgcgggagagggttggggtgaggggcgtcctagtcgttaaaataccagtaaccgctgttgattaacgccgtcagcagggccaggaacgacggatcgtccaccgcgtcgcccagcaaggcggcatcaacgctggcgtgctggcacagcgcatcggcggcttgcagatgttcggtgtcgattagctcaccgttgacaaagcattggtcgccaacgcgcagcacgcgtaacccacccaaacgttgtaatggctcaccctgttgcagtaactcatagatttcaccagcctgataaggcggctctggcggcgcgatgtccagctcgtggcgcgactgcgaaataaactcaccaaaccagttctggaagtgctccggctgttgcaccagctccaggatcatcccgcgcagcgcatcgacctcatgggggagaaccatcgccgggtgatcgcgcagtgcgatatccggatcggtgtaacgtttgctgcctaactcgcgggccagcacgtagtcggcatagccactcaccatctcgcggccattcggcgcgcggaaaccgacggaatagttgagcgaattctccagtgagtatccttcatgcgggaatcccggtgggatatacagaatatcgccaggctccatctcttcgtcaataatggcgtcaaacggctcaacctgtaacaggtcagggtgcgggcagtgctgtttcatcggcactttttcacccacgcgccaacggcggcggccagtgccctggatgatgaacacgtcatattgatcgagatgcgggccaacgccgccacccggcactgagaacgaaatcatcagatcgtccatgcgccagtccggcagcttacggaacggttgcatcagggcactggaaggctgatgccaatgatcaacggcctgcaccagcaatgaccagttgttctcgcccagatgatcgaagctttcgaacgggccgtggccaacctgccagcgaccttcctgatggctcaccaggcggctgtccacctcgttttccatggccaacccggccagctcatccggggaaatcgggtcgataaagttgttaaaaccacgcttgataattaccgggcgcttttgccaatagcgttgcaaaaagtcgttccagtcgagatctaattggtaatccatgttctattccaggatagagtgagcctgcagggattataacggaagttaggccccgtggatcggggcctgagcgacagaatttaatcgtgatggtgggagtcgtgctggcgagagaaggtgacctccatccgtgctccacccagcgggctgtcgctgatggtaatttgcccgtcatattgctcgatgatctcggcggcgaccgacaggccaatcccctggccggggcgcagagtatcgacgcgttggccacgttggaagatcagctcacgcttgctttccgggatgccggggccgtcgtcatcaatgacgatcgtcagatatttgtccgagtgcagcgaggagatctccacaaactccaggcaatatttacaggcattctccagcaggttgcccattacttccataaagtcgtttttctcgcccataaaagtgacttctggtgagatatcgagggtaatgactacccctttgcgctgatagaccttgttcagcgccacgctcaggctgtcgagcaaggccgataccgaatggatctcgcgggtcagcacggtttgaccagagttgatgctggctcgatgcaggtaataaccaatctgctgcgagatacgactaatctgctcgagcatgatcggctcgacctcttcgatggtggtctgcttgctggaacgcagcgaacgcagggtggtctgcaataccgccagcggggttttcaggctgtgggtgagatcggacagcgtagtgcggtatttggtgtaacgctgacgctcgttgcgcaccaggatattcaggtttcgcaccaagccacgtagttcactggggggattttcatccagttgctcgcgctcgccattttccaattcaccgacctgggttatcagcgctttgattggccgcaaactccaatacgcggctagccacagcagaggcacgaccagtagtagattggccagcagtacgtagctgaaccattcccacaccacatccgagcgttgcagttcctgcggaatgctgtcgaccaccacaatgctcaaggcaggcaggcgtggggtggcggcataggtattgacggccaccgagtgggttaacgcctcatggtcggtatcgtcatagtctttcagctgattctgagccttggggttgtcgcccagcacttcgctactgatgcgggtgtcggtgtctatctcatagaaaccggactcttgcagccactctttctggatccgtttttccagttccgggaccgagcgctggctccacagcaggttgcctttatcgtcgtagataaacaccagcgttggggagttgatatcgagatcgggcgggatggcaatggtcagcttctggtctttccactgcgcgaggctaaagaacaggttgctctcaccgcgcagcaggcggaaagcggttttatcaaagctgacgatatagccgacaaccgcaaccagcccataggacagcgacagcgccaggatcaccccggcggtggccatcagaaagcgggcgcgcagtgagaaaggttttttatctctgttgaacattatgctcacttggcatcgaaacggtagccctggccacgcacggtggtgatcacttcctgcgggtattcggcctgtagctttttacgcaggcggcccattaatacgtcgatggtgtggctttcacgcagttcggcatccgggtagagttgcaacatcaatgaatctttgctgaccactttacccgcgttacggatcaacgtttcgataatggtgtactcaaaggccgtcagtttgatttgctgttcgttgacgctcaactcacggcgtgagaggtcgatctggaatggtggcagtacgatcacctgtgaagccaggccgctattacggcgcatcaaggcctgcatgcgggcaatcacttcttccagatggaagggcttggtgacgtaatcatcggcaccggcttccagcaccgctaccttgtcctgccaactttcacgggcggtcagtaccaggatcggcaatttcatctgattggcacgccaacggcggatcaggctcaggccatcttcacccggcaaccctagatcgacaatggcgatatcaggcgcgtgttcctgcagaaaatagtcggcctctttggcatcttctgcggcatcaacctgatgccccatttcacgcatttgcacactaagatggtggcgcaataggccattgtcttcaacaaccagtactcgcatggtacagactcctgttgttaggcgggtgcaacaccaggcacccgcgctgaaaggttacacgctattggccacgttgtgaaaacgcgcactagctgaccattccctgatcgtttgattctgtcatcctgtgattatcggcaatggctaataaacgcaggataaacagcgaagtgtcaaaggtaaacaaaacttaaacaaagcctgactgcctgaagtgtgagcgggatcgctgcaaaggattaaaggtatcattaaggtattatataggtatcgtaatgatgctaataccaggaaccctacaccgctttcccgagccgatgccgggaaggtagccagcaaggatacataataatgaaacgtcctcatctgaagctgtctgtcatgatgtttatcgagtggtttatctggggagcgtggtttgttcccctatggcaatacctcaacaagctcggcttcacgccgggcgaaattgcctggtcgtacagcagtacggcgattgcggcaatcctctcgccggtgctggttggcgtcattgccgatcgctacttcgccgcgcaaaaagtcttgggctggttgcatctggctggcggggtgctgatgttcatcatcgcctggcaaaccacctttgccaccttcttcccgctgctggtgatttatgccatcacctatatgccgaccgtggcgctgaccaacagcatcgcctttgccaacattaccgataccgagaaagagttcccgcgcatacgcgtactaggcactttggggtggattgcctccggtctggtggtgggctttatgctgccgccgctgctgggtttaggcaatatttccgatagcaacctgccgttaatcattaccggtgtggcctcgatcgcgctcgggttgtacagctttgtgctgcccaatacgccagccaaaggcactggcccggtggatatcaaggcgttgctgggcctgaacgcgcttggcctgctgaaggatcgctcatttgccaccttcgccctgtgctcgttcctgttctgtatgccattggcgttttactaccagtttgccaatggctatctgacgcaggttgggctgcctaatgctaccggctggatgacactggggcaggtctcggaaatctttgccatgttggcgctgccgttgctgctcaagcggtacggcatcaagaaggtgctgctgctgggctttgtgaccgcagcgatccgctatgtgttctttatctacggcggtaccgccgacgtctgggcctacagcatgctgttcctgggcattttgctgcatggcgtcagctacgatttctatttcgtgaccggctatatctacgtcgacaaaaaagcgccaccgcatatgcgtaccgccgctcagggcctgatcaccctgatttgccaggggttgggcagctttatcggtaactggcttgggggccgtgcgatgaccacttttgcccttgaacaaccgcgagacggtatgacgtttgactggttcgccgtgtggggcgtgggtgcggtgatggtggtgggcgtcatgctgctgttcctgctgttcttccgtgaacgcagcgacaacatcaccccgattgacgtggcacggtcttaattcgttgcgccgggcctgttgcccggcaaggtaaaaattcaggagaaacagatgaagcagttaacccaggaacaacgcgtggtgggcgcactttatggtcaaatgctgggagatgcgcttggcatgccttccgagctgtggccgcgtgagcgggttaagcgccactttggctggatcgaccgcttcctcgacggcccagcggaaaacagcgccgcctgctatttcacggcagcgcagtataccgatgatacctcgatggcgctggcactcgccgacgcgctgatcgaggccgacggtgaagtggttccggagctgattgcccgcaacgtgatccgctgggtcgatagttttgacgccttcaacaaaaacatccttggccctagttccaaactggcgctgggggagcagaagaagggcacgccgattagcaatctggaaaacaacggggtgaccaacggcgcggcaatgcgggtttccccgttgggttgtgtgctgccttctgcaccgttggagcggttttgccagcaggtctggctggcctccagcccgacgcataaatccgatatcgcggttgccggtgcggtggtgattgcctgggcggttgccaaggcggtcgaaggggccagttgggcagagatccgcctggcgttaccgggggtgtcagattacgctcagcgccgccagagcaccaccttcagcgcgtctttagcggcgcgtatcgaactggccttccaggtagtcgaacaggctggcggtaccgagcaggcctccgaacgggtctaccaactggttggcgcaggggtcagcaccatagaatccgtaccggccgcgttggctatggtcgaactggcgcaaaccgaccctacccgctgtgcgatcctgtgcgccaacctgggcggtgataccgacaccatcggcgcgatggccacggcgatctgcggtgccttgaacggtatcgacgcgttcgacgcggctatgttggcagaattgaagcgggtgaatccgctggatatcaatcactacgcgcaggcctttctccgtttccgccagcgctggcaggaggctgaatgagtaacgaaagacgcgagttattgcagacgctgacccagggcggctggcatcagcagtgcccggtgacggtgattggcgcagcggtgatggatatggtggtgagcgccgatgcgttgccagtgcgcggtggcgacgtgtcggcccagatgcaggggctgcatttagggggctgcgcgctgaatatcgccgtggctctgcgccagttgggtattaccagtcgtaacctgctgccggtgggcgaaggcgtatgggcagagcgtttgcgtagcgagatggcgcagcgcggcgtgagttccgatctgcaagtggggggtgaggataacggctggtgtctggcgttggtcgagccggacggagagcgcacctttatctctatcgatggcatagagaaccagtggcagccggagtggttggcagacgtgacgccacaaagcgggctggtttacctttccggttatcaactgggtgccaggcagggcaacgtgctggtggactggctgttacgcctgcccaaacaggttcgcgtcgtgctggatattggcccgcgcattgacgtgatggcgcagagcctgctgcaaagcctgacccgcccaggggtgatcttgacgctaaaccagcgagaagcccagcaccttggcatgcaggaagatattgccggtttttgccagcatttatggtcaaccaccgggcaactggtgattgtgcgctgcgggggggaaggcggctattactttgccgggccggaggatcatggttggattgccgctcgccaggtcaacgtggttgacagcatcggtgctggcgatagccacagcgccggtttgctcgccgggctcgcattgggcctgaccgcccgccaaagcatgacgctagccaatagcatcgccggttacgtggtatcgcaggctggtggagattgtgcgccaaccctggctcagctcctggccagtgaggagctcaatcctcgctgataaactcgtacatgtcgctgcggcagaagctttcgctgtattcgatgggctttttccggctgtcgaacagcgtttgcttgatgatcagcagcggcatggggtctttcaactgtagcgcttgcagggtttcaccgtcgctcatggcggcgctgacctggctacgtagcgatcccagctccacgttgttcaaacggaagtagtcatacagagaaacgccaatatcatcaacgttggctatcgcctccgccaccacataagacaccgccaccgacatggggcgctgatcgataaagtgaatacgtttgagtttgtacaccggcgtatgctcggccagcgatagcttctcggccagtgcgctatctgccgggatttgctcacggctgatccacatggtgtccggcttacggccttgcagcatcacttcgcgtgaaaagcctttcacatccgccagcgaataggccagtttaggttgagccacggtattttgaatgaaggtgccatagccccgcgagcggccgataatgccgtcctgctccaggcaggccagggctttgcgtaccgtaatgcgcgagatccccagccgctcggtgaaatggcgctcactgggcagaaaatccccctggctcaatataccaagctcaatggcttgtcgtaccgattcgttaaagcgcaggtagagcggcatagcgccagcgctggtcagatcttgttgcagtttgtccagcaggcgctggttgggatccgtgctcatcagattgcctccgggaaacctgggcctctagaccggggaggaaaggaggcggttttcaagctaacttctttttg

SEQ ID NO: 319 - DNA, 317 bp, unknown
  Altogen  635822 strain
  misc_feature (123)..(161): n is a, c, g, or t
ccggcgttaaatttgctgtattgcagcggtgtagcattcggatcggtttttttgcgctcctcgttcacctcttcaaacttcgagccgctgcctgcaccgacgcctattgagtcgtaaaccacnnnnnnnnnnnnnnnnnnnnnnnnnnnnnnnnnnnnnnnttcatcttctttcgccttccactcatcagcccaatagaccacagagccgtagcgatagacgttcgcgcacttatcctggccactatcagcaacgtcgaagccaatgcgcttacggccactcggttcgaacccaagctttttatgcgcatcgatcgc

SEQ ID NO: 320 - DNA, 1862 bp, unknown
  Altogen  635822 strain
  misc_feature (72)..(161): n is a, c, g, or t
  misc_feature (1152)..(1277): n is a, c, g, or t
  misc_feature (1625)..(1742): n is a, c, g, or t
gcgcaagagctttacttcaccatattactcactgatgccactatttccgatatctcaggctcacaccctcannnnnnnnnnnnnnnnnnnnnnnnnnnnnnnnnnnnnnnnnnnnnnnnnnnnnnnnnnnnnnnnnnnnnnnnnnnnnnnnnnnnnnnnnnaccagtggttacagcatttgggatgacagagtctattaatataaagggggggtgaattatcagcatccccttcgtgctatgtatacatacgccttgcaataatatacggcaaagcacttagatatcctaatgccaatgaaagatatatcattggctcatcatccgatatatctatgttaaaaaagggtatttctcgatagtttagtacgtaaaagtgaaagaaggctggaatgactgaaataagaattgcgtaaacatgtggatatagcccctcagaaagcaatagttttttcagaagaataaaattccaaatcataaaaaacaaggacagtattagatatatggcaaacattagtagcttctcgcctgactaattccagtattaatatccccaaagacttccaccataatttccattgtattcatacccttaatacccatttcttttattccccacagaaggtctgcgtttatataacgatataaccgcgcagtatcctctgccaatttataaccaagcattccattcacggacaaagcaatatcgacaaccgtatacacaacatcagaatctcgcttgcttaagccaaattgctccccgataccttcataaacaaattttacgggcccagtgtaatcttttctatatagaagataataaccattttcaacaaccccattgactccatgtgcaatcaagagagccccagacatcgttccaacaacactccctaccattcctgcaccaacaaccacctgcaagcctgacgtaacaaaacctatgccagcaatagttagctttatgtttccctctaccctatcgttaatatttttcctcttgtcatctatgctagctttaacaaggattacctgttgtacatttttccttgtcatagcttcatcttgctttcttagatttgcgatttcctggtctaacgatctcatcgcttgatcttgcgttatttcacccgtattgactttggatgtaatnnnnnnnnnnnnnnnnnnnnnnnnnnnnnnnnnnnnnnnnnnnnnnnnnnnnnnnnnnnnnnnnnnnnnnnnnnnnnnnnnnnnnnnnnnnnnnnnnnnnnnnnnnnnnnnnnnnnnnnnnnnnnnatcctctcgatttatatacggatcgcgttggatgtcttccaactcatcatacatttcctgcatcaatctatccatgaaaaaaccactctttaatctatcgtttatcgcaaaaccgcttggtttatataattgataagaataccttacgcaaggtatttcgattgccaggcagatcacagaacgagctttagacttgctaatcagattcctcaaaatgaaaacccgattattagcgggtcattacttaagcatcaggcaatagcggccaatcaatatccggtgcggcttcagcatctatccggttaatcagcacccggtaacgcttccaggccagtaactgcgcctgcnnnnnnnnnnnnnnnnnnnnnnnnnnnnnnnnnnnnnnnnnnnnnnnnnnnnnnnnnnnnnnnnnnnnnnnnnnnnnnnnnnnnnnnnnnnnnnnnnnnnnnnnnnnnnnnnnnnnnngacccagcagggtaaaccctggctattagcaccccgcattttcccttctggcccttgtgcgcaatacgtcgtccactctgcatcagtaatgggttttacatcctccggccaattgccgtt

SEQ ID NO: 321 - DNA, 180 bp, unknown
  Altogen  635822 strain
tctattctattcagtatcaataatcagttttagaaggggggagtcatccccctttatctcccgttgggttaggagttttatgaaacttttccctctaaatactgcgcgtcaggttggcacttttgcagcgattgctcttttcagcagcagcagcctggccagcgtggtactcagcggcac

SEQ ID NO: 322 - DNA, 88957 bp, unknown
  Altogen  635822 strain
  misc_feature (80)..(202): n is a, c, g, or t
  misc_feature (33739)..(33739): n is a, c, g, or t
  misc_feature (54250)..(54250): n is a, c, g, or t
tcatgcctccttatccttgcctctcggcagataagaagctaacctaacgttgttcggcgttagagttggcctcgggttgnnnnnnnnnnnnnnnnnnnnnnnnnnnnnnnnnnnnnnnnnnnnnnnnnnnnnnnnnnnnnnnnnnnnnnnnnnnnnnnnnnnnnnnnnnnnnnnnnnnnnnnnnnnnnnnnnnnnnnnnnnntttgcaactgcctgaaaaaccaagggcccagcaatgctgagcccttggtggcaatggtggtaacccaagatagtctacgaagtttgcttacgcagcagatagacaaagtacggcgcgccaataaaggtcgccagcagccctgcggggatttggtaagggaacatcaccattcggccacaccagtccgcaaacaccatcagcaggccgcctagcagtgcagcaatcaccatctgcggcagcgcccggcggaatcccaacatgcgggccatatgcggtgccatcaggccaataaaactcagcggcccgacggttaacgtcgccatcgccgtcagcgttgccgccagcagcaaaatgctcagccgggtcggcgtcagggcaatccctacggaacgtgctgtagcgccgcccaacggcagaattgtcagccaacgtctacacagcggggccaagacaatcaacacgccagcaatcgccgccgtacgtattgcctgcggagcatccaccgagtaggtagagccggagagccacaccaacagccctcccatgcggggatcgccactggccaacagcaggaaaatggtcgtactaaaggcggtgctgagggcgatacccgccaacagcatgcgttcggtagagaatccgccacgtccagccgcaatcatgatgatcaacagcgtagccgccgcccccagactcccggcgggtaacaaccacataaaagcatcaccagggacgataaacagcatcattaccacgccgaaagccgcgccggaactgatccccagcacttccgggctggacatcgggttaccggtcagtttctggatcagcgttccggctaccgccagcatcatcccggccgccagggctgaaaccactcgtggccagcgccaaggcatcagcgcctgtaattcactgcctacgctccagtgccagccgtgggggttttgcccaaacatcagcgccaccgcaatcccggccaatagtaaaacgctccccagcaggatccatatcggtaagcggccacgttcgacaggcactttgtcgcccaaatccatcggcggcgggggtgcgctgctgcgtaagcgtggtaacaaccaaagcagcaacggcgcaccaatcagcgccgtcgccgcgccggtcgggatttcacgccacaccagcgtcagccagatcatcacctgatcggtcaaccacagcagcaatgcccccaatagcggagccaacatcatgcggtgggccagacggcgagctcccagcatcttggccatcaacggggcaaataggccgataaaaccgatcacgccgaccgcattgaccaacatggcgctgaacacaatcgccaccgccaacgccgcaaagcgcgacattgccaggcccaggcccagattacgtgccacgccgtcatccagccctaacagcgttaatgggcggatcaataacgcagccagcacggcaaccagcagcaagcgcggcaggataaactgcacggtcccccaatcctgctgatttagtgcaccggtgctccacaggaacaagccttgcagctgatcgtaattgaacaacgccagcagactattgactgccccgcagtacagcccaagtaccagaccggccaggattaacgtcacaggcgacatccgttttccccaggcaacgccgaacaccagcccaccgaccacaatggcaccgaccatcgccgccagctgtcgggtcaattcgcccccaggcagcatccacaacgtggcaatcgtcaagcctagctgagccccggcagccacgccaagcgtggcaggttccgccaaaggattacgtaatacctgctggaacagtacgccgaccaatcccaaccctgctcccaccagtaacgacaccgacaggcgtggcaacaggctgtagtggaacagcatctgatcgacattgtcgatgtctggttgtaccaaagcctgcgaccactgcccccacggcagttgatgcagcaggttgaagaacgtcaggccacccgccgctgccagcagtaacaggatcagcgctatcggcaagatatgcaggcgtgcactcatgagcgagcctcctgcgcctgctccagcaagcggcaaaaacgcatggccgaaagcgtagccccgtagaaccacaccgctggaacctgccgcagttggccctggcggataaacggcaaggcctgccacagcggcgtcttactgactttatccatcatggcttgattaccgtgatcgagataaatcgcgcgcgcattttttattgtcgccaggcgttcgatccccaccaccgaggtcccccagaagttggtttccccctgccaggcgttctcaatgcctagctgatccatcacttcctgaaacaggctcttctggccaatcaccaacacatgccgaggatcgagcaaagaaaacagcagcagcggctgttgccgataccccgccaggcggttacgcgcctccagcatgaaagcatcaaactgttgcagatgctgggtagcccgcgcctccagacctatccgttgtgccagctgcagcaacgagtttttgcccacggtgagcggtttaccgctgccgtcgttaaaaccaaactccatggtcgggccgataggctgcagtttttgtggcgaagggccatagcctttggaaagcaggatcagagaaggtttgagttgttgcaacagctccagattgggttcggtacgttgaccgacgtcgatcaccgagtccggcaaccgaggatcttgtacccacaggttgtagttgtggatatcggcaaccgcctgcggcatcacgcccagtgcgatcagcagctcgaccggtagccactccaatgccgcgatccgggtgatatctggcaagcctgtcgcacgcgacggtaaagagaacaacagaggcgataatgccatcgccgttaataaacgccggcgcagcggatcatgatgaaaatcggcagaggtaggcattaatacacgaagctcactggtgcaccgccacttggatgcggcaatatgcccatagggatgccgtagatctgttccagcaccggcccttgcatcagttcgagcgatgacccctgggcaatcatttcgccgccgcgtaacgccaccagatggtcgcaataacgagccgccatgttgatgtcatgcagcactgcaatcaccgtcaggccgcgttcatggctcaggcgttggatcaacgccagcacttcaacctgatgggcaatatccaacgccgaggtcggttcatccagcaacaaacaacggctatcctgcgcgaccatcatcgccagccaggcccgttggcgttcgccaccggagaggctgtctaccaggcggttggcaaagggtttcagccccaccaacccgatcgcctcttccaccagatcgcgatcgccagccttgaaacggcctaacgcaccgtgccacgggtagcggccgatggcgaccagttcgcgcaccgtcatcccttccgctgcgggcaattgctgcggcaaataggccacttggcgagcaaaggctttgctatcccattggcccagcggttgcccattaagcaatgcctggccagaggtaggattttggtgacgaccaaggattttcagcagcgtggatttgccggagccattatgaccaatcaatccacacactttgccttgaggaaaggccaatgacagcggctgtaacagcacccgccctggcacggcaaagctcacgcggtcgagctggaaagtagcatcgcgattaaggtgtttatcctgcataggccctgcttggctgggagcgaccaaaggccgcccccattagccgattagaaactgaaggttgccgtggcgaccacttgacgttctgcaccccagaaacagccataggtggcgaaacagctagagacatactctttatcaaacagattgttaacgttaagcgctacggaagaacctggcaggttgaagcgcgccaaatcatacttgaccacggtattccacacggtgtaatccggcactttgaaggtgttggcttcgtcaccataggtcgagccggtataacgcacacccgcgcccagcgtcagaccactcaatgccgtttcgtggaaggtataatctccccacagcgaggccatatgcttaggaatgatcgccggcgtattgcctttgttggtggtgtctgcagtgtattcagcatcggtataggtataagacgccagcaggttgacgttagccgtcagtgccgctttgccttccaactctacgccgcgagagcggatctccccggtttgctgctggaaccaacctttatcggcatgctcaacatccgtgaccaggttatttgacttggtcagttgatagagggcaatggtggctgagacagggcgatcttttggcatgtacttcacaccagcttcatactgttcgcctttggaaggcacaaaggccttgccgtcaaaacctgcgcccacgttcggctcgaaggattgtgcgtagctgacatatggcgagatgccgttgtcgaacagatagttcaggccgatgcgattggtagactggtggtctttctgctcactgtaggggatcgtagccgcttcagtgcgatcctcaacggtgctttttgcccagtcataacgcgtaccggctgtcaggatccactggttccactcggcctgttcctgcaggtaaatacccacctgccgttggccattgaccttactggttgggtttaacgctcccttggtataatttccaaactgcgggttggctagatccagtggactcaccacaccccagccgccctgaatatcgttactcatgcgcataaaatctaccccagccagcaacgtatgatccacgcggccagtagcaaacttggcctggccctgggtatcgacgctgaagttattcagacgctcatccgaagcgatatagttacggttgagggtcgtattgtctgcattgaccccggtgccatagatattgttctggttggtatgcaactgcatataacgcaggttctggcgtacggtccaggtatcatcgaaatcatgggagaagctgtaaccaaacatgcgcgtctggcgcgaatagaagttactcttttcaccttcgttgaagctggttggcagcttgccataaggcgcgttaaccaccgttccctgcatcggcaaccagccgtagtagccgaggttaggatcgttttgcaggtaagaatacagcgtcaggttggtatgctcatcgggctgccaactgaatgaaggcgcaatggtatagcgtttttccttggccatctcctgctgagcgtcagcgtctttggccaacccggtcaggcggaaggaatacttgccgtcatcatccaatgcattactgaaatcaaagccagtctggaacaggttatctgtacccattttaaattggatttctttcagcggttccgtggttgggcgcttgctgatcagcgagataatcccacccgggctgcttttaccgtaaagcacggaagaaggcccgcgcagcacttcggcccgctcgaggaaataaggatcgattacggcttcgttaaaatagtcgccttgcagcttcaatccgtccagatagatattctggttgaccgagccaaaaccacgaatataaaccgcatcatagacgttggagctgccgcggctgcccaccatcacaccgggggtgaagcctaacgcttctttcaccgaggaaggctgcataacgtccatttgttcacgcgtgaccaccgataccgattgaggggtcttcactagcggcgtatccgttttggtgccggtcgcgctgcgtttcgccacgatggtgccaactgggccccaggcgctttcctgtgaagcaccaccgttgccgccccctaccaccgtaatagtatcggcatctgcggcagccgtcgtctgagcagcaaccgcaggcaaggttagcgtagccgcgatcgtggcagccaaaacgcttacggggaacaagccagatctggctggtgatgagggatgacgcttggtcggcatgtctggtttctctgatgtagtttgataacgaatgtgaacgataataattattataagcgcggcattttatgcagaaggctaacggaactgcaagcgtatttcggccgtaaaaaggctatgggattggcgcggtaaccgcattaacagagtggaaataaaaccgacaacaaaaaaaggaaagcccgtaacagaacgctacgggcttgataacgcggtaaaatcaaatgataaatatgcttaacataacggctgtggtttatttgccaaacatatcttttatccagccagcaacgccgtcggcatctttctgttcgccagcttgctgctgctgagtttgttgctgctcggcctggcttgcctggcatagcccctgcgggttttcagtccaaaccgggatggtgcgccaactgctgccactacagataaagttaccggcagaatcaatacccatctggctaatgccttccggttgttgcagcttcagcaccagcggcgtctggttttccagatagcgtcgatacagcgtcaaggcgccgttggcaccggtcagcttggccgggccgttattgtcacgccctacccaggcaatcgccacttccttaccgtcgataccggcaaaccagctgtcacgcagatcgttagtggtaccggttttagcggccaggttgtaattagggaacttgaccgacagcgaacgggacgtcccgcgtgccacaccctgctgcatagcgtacagcgtcaggtaagccgcctgtgctggtaccatacgttccgcctgcgggaagctctgatacaacactgtaccgtcttccgcaatcaccgaacgcacggcagacagcggcgcacggttacccccgctggcgatggtctggtattcctgtgccacttccatcggcgtcaggccaatggcccccagcaacatggaaggcattggagtaatcgccgatttaggaatacccagtttttgcagggtagcgctgatctgatccagccccaccgacatccccaggttgaccgttggcacgttgagcgagttggccaacgcatccaccagcatcactcggccacggaactgacgatcgtagttattcggctgccacgaactgccattagacagtttgatcgacagcggctgatcggccagccaggtattgagccgatacttatccggttccgacagcgcggtcagataggttggtggcttggccagtgaccctaccagacggcgcgcctgcagcgcacggttaaagccggcaaactgaggatcggcaccgcccaccatggcacgaacctctccggtaaagcgatcgacaatcaccatcgccgcttccagatcgttcaggtgacgcgcagcacgcagcgccgggataccgtcctccaccgccttctcggccgcatcctgtgaaaccggatccagcgtagtgaagatcttcaccccggaaagatcgttaaccttgtcacccagctttgcctgcaactcctgacgcaccaactgcataaacgcaggctgcggtgaaatcaccccacctttcggttgtacacccagcgggcgagcactcagcatgttgtacagctcagcgtcgatcaccccctggttctgtaacagcttgagcaccaggttacgacgctccagcgccagcgttgggttacgccaagggttatacagcgaggcccctttcaccatgcccaccagcagcgcctgctgatccagactcagttcatcgaccgggcgaccaaagtagtacaggctggccaacgggaagccacggatctgatcgctaccgctctggccgagatacacctcgttcagataaagctccagaatacggtctttgctataacggtaatccaccagcaaagccatgtaggcttcgttgaccttacgccacagcgaacgctcgttggtcaggaacaggttttttaccagttgctgagtcaaggtactgccaccctgcaccgcacgcccggctgtcaggttggccaccacggcacggccaatggagtaaaagctgataccatcatgctcgtagaaatggcggtcttcggtagcgattagcgtgtcgaccagcagatcagggaaaccagagcgcggcacaaacaggcgttgctcgccattcggcgattgcagcatggtgatcaggcgcggatcgaggcggaagaagccaaagttacgctgattttccatgttgacgattttcgccaggccattgttttggaaatcgaggcgagcgtggatctggccttctttgccatccgggaaatcaaacgggcggcgcagcatctcgatgctgttggcctgcacggtaaactctccaggccgggtcatgcggctgacctggcgatattgcatcccttccagcagggcaaccatttctttcttgctgtaaggcatacccggctcaaggttgaccatgcggccatacaccgccgccggtagctgccagactttgccatcgatgcggctacggatctgggaatccagataaactccgtagatcgccagcagcaccgcaatcaccaggaacagttttatcagcaggccgagccaacggcgctttttacgcggcgacttcgcttttaccttgggcggcatgcgttgttcctcttcgtcgtcatcgtactcatcatcgtcatactcatcctgatactcgtcttcttcataatcgtcgtcacgctgacgacgcgccggtttacgcggcacattacgttttggttgtttgcctttgcgcccgatgggctcgcggtcatccccagccattgcggttcttctccacgcttgcagcactctataccctatggatttcaagctgtagccaggcgacaagctatctcatccccaggagcttacttttgggtaagtgactggggtgtgatagcgcaggtaacaacgctgcagcttgaaagacgacgggtccgttattttgtcgcttaatctgtccctaagccatctggctgaacagaagaaacatctgaattcgttactggtatttcttggtgcgccgggtgggggcggtattggccgggtcgtctggccatacgtgcttgggatagcgccccttcatttccttttgcacctcgcggtacgccccttgccagaaagcggccagatcgccggtgatctgcaatggccggtgcgccggagagagtaactcaagcaccaccgggatgcgaccctcagccaacgttgggctatgctgttcaccaaacatctcctgtaaacgcaccgccaataccggcggtttatcggcatcgtagcggattggtaaacgactgccggtcggcacagcataatgagttggcagggcattatccagccgttgcttttgctgccagttcaaccggcgggccaaggcttcagcgatattgacctgctttaatccgcgcagatcgcgtacgccgctcaatgacggcagcaaccagctttccagagagtcgagcaacgtctcgtcatccactggcggccactcggcctctggcaaccaacgctgggcacagtgtaaacgcaggcgcaactgttcggcagcggtatcccaatcaagcacggccaatccctgggcgcggacccagtttatcagtgcctgttgcagttcctcttccgccggtttggccagcggttgagcccgcagcgttaagcggcctatctgttggcgcttccaggcccgcagggtgcccttttcttcatcccactcgacggcggtctggctgctgacaatctcaggcaaccgagccaccagcgcatcaatttcgatcggtaacgccagcaggatacgggcatccgggctgttatggccttgcagcaggctgggaataatcaaccagggagccctggagagcgcttcgtcctgatccatcgccgcgcccaggccattggccaacagatagcggccatcctgtccacgccgttgggcgatacgatcggcaaatgcctgcgccagcaaaggggcggccagaccaacgtcaatctgtccgcttttttgcggtaagcgcttacttaattggtttgcccggcgctgccaatgcggctgtgggcggctcagccaatagccgatatccatctgcccgctgcgtggcggttcctccagcagggcagccaacatcgccgccgtggctactccatcggctcccatcttggcaccggcacacagcatggccgccagtctgggttcgcaccccaacccggccatttggcgaccaatggctgtgagcttctcgccgtcatcgatagctgccagggtatgtaataaacggcgagcagcagctaatgccgccaacggtggccgatcgatccaggtaagttgatccacatccacacagccccattgcagcagctctagccagaagctggccagatcgctttgcaggatctccggttccgcatgttccgcagcgcgctccgcctgctctttggcaaacaaatgccagcaaattccgggttccaagcgcccggcacgcccggcgcgctggatcatcgaagcctggctgatgcgctgggtgaccaatcgcgtcaggccattacggacgtcataacgcgctactcgctccagcccgctgtcgacgaccaggcggatgccttcaatggtcaagctggtttcggcaatattggtcgccaacaccactttacgccgcccgtgctgcgccggttggatcgccttttgctgctgtgtcagcggcaatgcgccatacagcggacagagatcggtatccgctggcacctcgccaatgagccgttcctgcacgcggttaatctccgccacgccaggcagaaataacaacagcgaacctgattgctcagccaataggcgctttaccgccgaggcaacgccatcctccaaccgctggtgactaggtaatggctggtactgccgttcaaccgggtagcttcgtccttctgacaccaccaccggcgcttgcggcagcagttgtgacaagcgcgcattatccagcgtcgccgacatgatcagcagtttcagatcgtcacgcaggccctgttgcacatccagcagcaaggctaaagccagatcggcctgtaaacttcgctcgtggaattcatcaagaataatcaacgagacgccctgcagttcagcgtcctgctgcaacatgcgggtgagaatgccttcggtcaccacctccagccgcgtctgcggcccgcttttgctctcggcacgcatgcgatagcccacggtctggcccggttcttcacccagctgttgcgccaagcgatacgcgacgttttttgccgccagccgccgtggctccagcatgatgatacgccccggcagcccagcttttgccaggatctgcaacggcagccaggtggatttcccggcaccggtgggggcatgcaacaacacctgcggggcagattgcagtgcggcaagcagctcatcaagaaccgcgctgacgggcaatgaggacacaaaactctccctggggtagttaatggacggcgcacattgtagcattacgccccgtgtttcattgatattccggggttccatgtccagttcgcgccgcctgttctttgccttgtcgctacccgatgccttgcagcagcaggtgatccgctggcgtgccgaggcatttaaccccgaagatggccccccgttagccgccgccaatctgcatctgacgctggcctttctcggcgaggtcagcgcacagaaagaacaggcactaaaaacgcaggcagggcgtatcgcacaagcgggtttcagcctcaatctggacgatcttggccactggccgcgccccggagtggtgtggttgggcagcaaacgccccccacgcgcgctgttgcagttggcggagttgttgcgttcgcaagcggcccgcagcggctgttatcaaagcccgttgccgtttcatccccatatcacgttattgcgggctgcaacccaaccggtcgctattcctcctggcacgccgggttggccgttcaacgccagccatttctctctctaccaatcgtcgtttgaacagggccgcacccgctatcacgaattagcgcagtggccactcggcccacaggataaatcatgatctttgacccaccgctaaaaccggccacgctcatcaagcgctacaaacgttttctggccgatgtgatcacccctgaaggcgaaacctttaccctgcactgcgccaacaccggcgccatgaccggctgtgctacgccaggggacaccgtgtggtactccacttcggataacgccaaacgcaaatatgcccacagttgggagctgacgcatacccaggcaggcgactggatctgcgtcaacaccctacgggccaacactctggttcgtgaagccattgagcagaatataatcagtgaattatccggttacagtaaaatcaccggcgaagtgaaatatggcggcgaaaacagccgtatcgatttgttattacaggcagaaaaccgggttgactgctatattgaagttaagtcagtcacactattgcaacatcaacagggctacttccctgatgccgtaacgctgagagggcagaagcatctgcgtgagttgcaaaacgtggttgaacaagggcagcgggcggtgctgttctttgccgtgttacacagcggcatcgatcgggtcaccccagcaaatcatatagatgagcattatgcggtgctactagcgcaggttcagcagttgggagtggaagttgtttgttacggggcaaaattatcacctgacggtatctcgctaagcgctaagttaccgttttttattggctagcggggccgggcacaaataaatcgacaaccggatattgcgtcgccaaatacgccttccttcacaccattgtcaagcaggcgacaggaataattgccatccctcttcccttctgttatttatagcggcctgtttttcccccgtattggggattcgacataccctactagcattaaagggtatagtgcgtgtgtatgtaggagaagcaatatgcaagaagggcaaacccgtaaaacctcgtccttgagcattctcgccatcgctggggtggagccgtatcaagagaaaccgggcgaagagtacatgaacgacgcccagttgacgcatttcaggcgcatccttgaagcatggcgcaaccaactcagggacgaagtcgatcgtaccgtgtcgcatatgcaagaagaggcagctaacttccccgatccggcagaccgtgccactcaggaagaagagttcagcctcgaactgcgtaaccgtgaccgcgagcgcaaactgatcaaaaagatcgagaaaacgctgaagaaagttgaagacgatgatttcggcttctgcgagtcttgcggcgtggagattggcattcgtcgccttgaagcgcgtccgactgccgatttgtgcatcgactgcaagacgttggccgaaatccgcgaaaagcagatggccggctaagcagttgttacctcctgcggcgcgtgccaataacgcgcgccgcatagagttaagggaagtaatcccttcagatatgctagcaagtcactatgtggggcgctttgccccatcgccttccggggatctgcatttcggttcgctgattgccgctctgggaagctacctccaggctcgtgctcaacgcgggcaatggctgggacgtatttaagatatcgaccctccgcgcgaagtcgccggagctgccgggcgtatcttatccgcactcgaacactatggtctccactgggacggccaggtcatctatcaatcccaacgctctgaagcttaccgtgcgacccttgattggctacaacgccaggatctcagctattactgcacctgtacccgcagccgcatccagcagatcggcggtttgtatgatggccattgccgccagttacggcttggcccgcagggtgccgcgatccgcttacgtcaatcaaacccggtatatgccttccacgatcggttgcagggcgagcttcgggccgatccagcgctggcacaggaagatttcatcatccgccgccgcgatggcctgtttgcctacaatctggcggtggtgatcgacgatcattttcaaggcgtgaccgaaatcgtccgcggtgccgacctgatcgaacccacagtgcgccagattgcgctgtatcagcaactacaggcaccggttcccgcctatgtgcatttgccactggcgctggggaacaacggcattaaactgtcaaagcaaaatcacgcccctgcgctgcccactggcgatccacggccagtactggttgctgccctgaagtttctgcaccaaccgctgccggaaaactggcaagatcttgatctgccgttattattgagctgggcggttgagcattggcagttggcaaatgtgccacgtcagcaagcgatcccgcagtgtgaaaacacaacggcattctcaaaacagctggggtaagctatgattagccgctatttttttgttagcgccatttttatccgtcactatcgaggtgtaccatttttacccgagtagccaatttctgccgtaaggtactaatccgcgatgacaagttgacccgcgaagatgcgccggccagcgataaaaaccaagtccgcgaagaaagcgcgcctgcagaaccgttagcaacaacgccaccgcgctcaaccgagagcggcagagagacacctgcccgccgtccagcgccgcgtaaacgcccgccatttgtagccgcagagggaacgcgctcaatgaccgttatcccccgcgatcaacatgcgatctcgcgcaaagatatcagcgaaaacgcgctgaaagtgctgtatcgcctgaataaatccggttacgaagcctatctggtcggcggcggtgtacgcgatctgttgctcggcagaaagccgaaagatttcgacattactaccaacgccaccccagagcaggtgcgtaaacttttccgcaactgccgcctggtcggccgccgtttcaggctggcgcacgtgatgttcgggccggaaatcatcgaagtcgccaccttccgtggccaccacgaacagagtcaggaatctgacaagaactcctcccagcaggcccagaacggcatgctgctgcgcgataacatcttcggtaccatcgaagacgatgcccagcgccgcgatttcaccatcaacagcctgtattacggcgtagccgactttgccctgcgtgattacgtcggtggcatgcgcgatctgcaacagggcgtgatccgcctgatcggcgatccggaaacccgctaccgtgaagatccggtgcgtatgctgcgcgcagtgcgctttgccgccaagttggacatgaccatcagcgaagaaaccgccgagcctattccacgcctggcctcgctgctgcacgaaatcccacctgcacgcctgtttgaagaagcgctgaagctgctgcaaacgggttacggttaccagacctacctgaagctgtgtgaatatcagctgttccagccgctgttcccattgatcgcgcgcaacttcacgccgaatcacgacacgccgatggagcgcattctggagcaggtattgaaaaataccgatcaccgcctgcaaaacgacaagcgcgtcaacccggcgttcctgtttgccgccatgctgtggtacccactgctggagcacgcacagaaactggcgcaggaaagcggcctggcctattacgacgcctttgcgctggccatgaacgacgtgctggacgaagagtgccgttcactggcaatccccaaacgaatcactacactggtacgtgacatctggcaactgcagttacgcctgtcccgtcgtcagggcaagcgtgcgcacaagctgatggaacaccctaaattccgtgcggcgtatgatttgctggcactgcgtgccgaagtggaaaacaacccggagatgctgcgtcttgccgaatggtgggatgagttccaggtggccaccgcggcccgccagaaaaacatgttgagcacgctaggcgaagatccggcaccgcgtcgggctcgtcaacgccgcccacgccgcaggtctccaaataacgaaggagcataatgatccgcgtttatatcgcgctgggtagcaatctggcgcaacctttgcaacaggtgaataccgcgctggaggcgttggagcatattccacgcacccgtctgatcgcttgttcaccgctgtaccgcaccaagccgctggggccacagaaccagccggattatctcaacgcggtggtggcactggatacccagttgccaccggaacagctactcgatcacacccaggcgatagaacgtaatcagggccgagtgcgcaaagatgaacgctggggccctcgcacgctggatctggatatgatgctgtacggcgatctggtgatcgacaccgatcgtctcacggtgccccattatggcctgaaacaacgcgaatttatgctctacccgctggcggatatcgctccggatctggtcttcccagatggtgaaacgctggcagagtgcctgcaacgtgtgccaaaaaacggcatgacgctgtggcatcagcccaaggcttgaataccgctcccagacaaggttatcgttgcgataaacccaccctcctgccgattggcaaagctaacacgtagcccatgcaggctggcaatccgctgcacaatagacaagcccagcccgcttcccgtctgttcttgccccggtgggcgataaaagcgctcccccagtctttccagatgctcagccgtgacgccaggaccatcgtcctccaccgtcagttgccgctggctaagcgtgaccgtaaccgtgccaccggccggagtgtaacgtaccgcattgtccaccagattgcgtaccaacagcgataacagcagcggctggcccgataatgcaggaggttcgccctgctgctggtaacgcagtgtgatcccggaggtatgcgcctgtcgatccagctccgccagggtcatcggcacccattggcaccagtcgaccaaggccagatcgtgcaaatcggcgagcgagtccagccgggacaaggtgagcagttgatccaccaggcgcgtggctcgatcgatacccaccgtcaggttgttcaccgcatgttcacgcatgggcacatcgtctcccgccagttgcaccacctcagtctgcaccctcaatgcggccaacgggctacgcaactcatgggcagcatccgaagtaaaccgacgctcacgcaccagcaggctattaatgcgcgtaaacagcgtattgagcgcctcgaccaacgggcgcacctcactaggtacctggtgtgcactcagcggcgtagcgtcgtctggggctcgtttacgcaggctggcggccacctcacgcaacggtcttagctcgcggcctaccatcagggcaatcaacaacatcaggatcggcaacgtcaccagccagggcagcaactgccccatcaccaaccccaacgccatatcatgtcgataatcccattcctggccgaccacaatacggtaacggccatccgggctggtgagccatagcaaccgccagctgtcgctatctcctttgcggagaccatcgacaaacccttgccgctcgccgtcaaactgaaaatcctcaccgttctcaccgtcattgagcagcatgcgtccatcgtgggaaaagatggcgaacgccaacgcatcatcgtcctgctctccgcgtttaccgtggttcagcatcttcttggttttcggcagactgcgcacttgctgattagccagtaaatcccccagatcggcggtcgccagccgtttggcaaacagcatctgttgggtgtcgaacacttcgttgatattgtggcgcgtcatcatccacgccaccacgctggcagagcaccaggtcagcaatgccagcaggctgaagatcaggatcagccgcaaccgcaaactcaatgacttcacggctcatcccccagcgtgtagcccacgccatgtacggtgcggataaagccgttacccagcttgcgccgcagatgatggatatggacctcaaccgcgttactgctcacgtcatcatcccagttatacagtttttcctggatcagcggccgtgccagcacgcgccccttgttgtgcagaaacaattccagcaccgccagttcgcgtggggtcagcgttacgggttcaccgttgcagttcacgctgcgcgatgcggcatcaaacaccaggttgccatggaccagttggggcgtcagttgcccatggcggcgacggatcaacgcctgtaaacgcgcggcaacctccgtcagggcaaaaggcttgcacaggtaatcgtcggctccgctttgcaagccgctgacacgctgttccagtgcgtcacgcgctgtcaggatcagcaccggtacatcttgtccggcatgacgccactggcgcagcaaatccaacccgtccaaccccggcaagctgagatcgaggatcaccgcatcataaggagcgctatccagagcgttctttccgatgatgccatcggtgaaccagtcgaggttaaaccccagcttggtcaagcccgccttgatgccatcaccgatcagtttgtcgtcttcaatcaacagaattctcatgcgcactccctttggacagaccattacatcataagcttcttaagaacatcttaaccatcagcatcggagctacccacccctgaagggttacagtagaatgacagcactttttaccaccgtgctacaaatccaggccgcgcggttactgcaggagacgttgtgatgaaacctaccaccctgagccatttacgccagtggaagcaggagcagcgcaagtttgcgactattaccgcctacgatgccagctttgcccagctgtttgaagaacaaggtattaaagtattgctggtcggagactcgctgggaatgacgctgcaagggcatgactcaacgctgccggtaaccgtggccgacgtggcttaccatacccgcgcggtacgcggtggggcaccagccagcctgctgttggccgacctgcctttcatgagttacgccacgccagagcaggcctgccaaagcgcggccgaggtgatgcgcgctggggccaacatggtcaaaatagaaggcggcagttggctctgcgaaacggtgaaaatgctcacggagcgcgccgtccccgtctgcggccatctgggcctcacgccacaatccgtcaacgtgtttggcggctacaaggtgcaggggcgcgatgagttggcggccaagcaactgctgatcgacgcccagaatctggagctggccggtatgcagttgctggtgctggagtgcgtaccaaccgaactggcccgccaggttaccgaagccttgtcgatcccggtgatcggtattggcgccggtaatgctaccgatggtcagatcctggtgatgcatgacgccttggggatcaccggcggccatacccctaaatttgccaaaaactttctggcgcagggcggcgatattcgcggcgccgtgcagctgtatattcgggaagtcgagcaaggtatttatcccgacgaagagcactcgttcaactgagtgaccggccacgattgatagctaactagcttatccctcaacaccgaggagttatggaatggtaattatcgaaaccctgccactgctgcgccaacagatccgccgctggcggcaagagggcaagcgcgttgcgctggtgcccaccatgggcaatctgcatgaaggccatatgacgctggtggaagaagcccgcgcccgtgccgacgtggtggtagtgagcattttcgttaacccgctgcagttcgaacgcgcagacgatctggagcgctatccgcgcaccttgcaggaagactgtgaaaagctcaatcgccgtaatgtcgagttgatcttcgcccctgccccggccgaaatttaccccaaagggctggaagaacacaccagcgttgatgtaccggtgatctccaccatgttggaaggcgccagccgcccgggccacttccgtggagtctccaccatcgtcagcaaactgttcaatctgatccagccggacctggcctgctttggcgagaaggattatcagcagttggcgttgatccgcaagatggtgacggatatgggctatgacattgatatcgttggcgtgccgacggtgcgggccaaagacgggctggcgctaagctctcgcaacggttatctcaccgcagaagaacgcaaggtcgcaccgcagttgagcaaaatcatgaacgccctggcggagcagctaggcaacggtgaacgccacgtcgaagagctgctggcacagaccgccgagaagctgcgcgaggcaggtttcaccccagacgagctgtttattcgcgatgccgacacgctgcaaccgctgggcgtagaaagccgccgggccgtggtgctgatggccgcctggttgggtaaagcccgcctgatcgataatcagcaagtcgatctgacgcagtaagccatttgttgtacagtcgttgccgtttttacccggttggcggtagactgatcgggttttcggtgacgataaatattgcaaggaagcagctcttcttcagccgcctgaaaaggccgatattcagttaggtaacgctatgatacgtactatgttgcaaggcaagctgcatcgggtgaaagtgactcaggctgacctgcactacgaaggctcctgcgccattgaccaggattttctggaagccgccgggatcctggaatatgaagcgatcgatatttacaacgtggataacggccaacgtttctccacctatgccatcgccgccgaacgcggttcgcgcattatctcggtcaacggtgcggccgcccgctgtgcctgcgtaggtgacaaactgatcatctgttcttacgtgcagatgagcgatgccgatgcccgccagcaccaccccaaagtcgcctactttgaaggtgacaaccacctgcaacgcaaggcgaaagccgtccccgttcaggttgcctaaaaaaatcgggcgctttcagcgcccgtcttctctctattccgttaccgtcacacccggcaatgcaccagacttgttggctatccgctccgccatggtggggatggagtcggtgcgcaggatatacagccgtttcaaggtatagggattatcgcccggcttaactttgccctgcaccgtggtcaccgccatatgaagcccggcatcttttgccgcctggatcgccttttggttataaccaccaaacggataggaaaggtacagcacatgcggattaaactgctccaacgcccgtcttgagtgctcaaaatcgaattcgatgttatgcagcgaacggctgagcaggatcggctggcggttgccatcggtgcgatgcaggaaatgggtatgcgactgaatatcaaacacatcctggatcgttttcagctccgaaatgctcataaactgcaacgaatccgggttccatttttgcggatgacgtttgatgcgtgaagagatgataaacgccgtcgcgcggaaaccgtaatccttcagtaccggatacgcgtagcgatataccgatttcaacccgtcatcaaaggtcagcaccactactttgcccggcaggttgatttgattattcaggtaggcttccagctggtacatcgagatggtgtcataacccgtctgcttcaaataggtcatctggttgctgaaggccacgtccgaggtggtcgtcgacgtattacggaaacgtttgttctcttcgtttttcagcagatggtgataagtcagcaccggaatgccgttgtcgacctcacagtccaattcgctgataaatcccagacgatcgccgatattgacttcgtaccaggtgttattgagccgatctttcagcttgccgataatcggatagcgcaggttctcttccagtacgccaaagatttcacttttgttatccgccgccgtgtagacgttaattgcgcgctgggtgatcaggttctgattggtcaacggcttgtttaactcccccagatcgtccttcaccttacgggtcttgctgatggcgcgaacgtcgtctttatcgataaagccggtgccgtagccgaacttaagctcgtaatattccgcgtccgcggggaacatctggatcagttgtccttttttcacttcaccgaccgggatcacatgctcaccgatcaacgaataaacctcgctgttacgctgcacttccatgtattgggcttgaacagcgctgtcttctgacagcaaatccgccaacgctacaggtgccaacaacgacataacaatgccgagtagtcctgctgttatcttatgttgaggctgcatgatttgttctgcttacgagtgcgtcatgaaaaaatgaagaaaatgtggatttccagcatagcacgatttaaatcgccgggagaaagggcttattgccttaaatttatagatttagctgatgtgtgtgccaaatcaataaactccctcccccgacaacaggggagggaaatcacatcaggaacgcaaaccgcggccacgctcaatgagataccaggccaacccgtagaacaccgcaatgaatgccaccagcaccagcatggtcagcgctaacggcacgtcggaaatgcccaggaaaccgaaacggaaaccgctgatcatatagacgatcgggttcagtttggagaccgcctgccagaacggcggtaacagcgtcagcgagtaaaataccccgcccagataggtcagcggcgtcagcacaaaggtcgggatcaggctgatatcgtcgaacgtgttggcaaagaccgcattaagtaaaccgcctagcgagaacaggatcgctgtcagcagcagcgttaccgcgatcacccaccaggaatggaccaccaggggaacgaagaacagcgagatcaccgtcaccaggatccccacacagataccccgcgccacgccaccgccaacataaccggcaatgacaacatgcgttggcaccggtgccaccagcaactcttcaatattacgctggaacttggcgctgaaaaacgacgctgccacgttggcgtaggagttggtaatcaccgccatcatgatcaggccaggcacgataaactgcatataatcaaaaccgtgcatctcaccaatacgcgacccaatcaggttgccaaagatgatgaaatacagggtcatggtgatcactggcggtaccagcgtctggatccagatgcgggcaaagcggttgatctctttagcccagatgcttttcaaggccacccaatacaaatgcatcatgcttgctctccactgccgttcaccaggttgacgaacagctcttccagccggttggccttgttacgcatactcaggacctggatcccctgcgcgctcagttgggtgaacagaccgttcagaccttgctcacgcatcacttctacttccagcgtggaggtgtccgtcagacggctgtggtaaccctcaagatggggcaatgggcttttcgccgccagatccaggatgaaggtttcggacttcagtttggccaacagccccttcattgaggtgttttctaccagctcaccgttctggatgatgccgatattgcggcacagcatttcggcttcctccagatagtgcgtggtcaggataatggtagtgccctgggcgttcagctctttgaggaagccccacatcgaacgacgcagctcgatatctaccccggcagtcggttcgtcgaggatcagcagtttgggctgatgcatcagcgcacgggcaatcatcaggcgacgtttcatcccgccagacagcatacgcgcccgctcgttacgtttcccccagagatcgagctgattgagatacttctctgcccgtgccatcgcctcgcggcgttctacgccatagtaacccgcctggttgaccacaatctgcagcacggtttcaaacgggttaaagttgaactcttgcggcaccagcccgagctggcgcttggcgttaacgatatccttatcgatatcgtaaccaaacacccgcaccgtgcccgccgtcttgttgaccagcgaactgataatgccgatggtggtggatttcccggcgccgtttggccccagcagggcataaaagtcccccgcctccacgttcagatcgatgccgcgcaatgccttgacgccaccggcgtaggttttggtcagctgcgctatttccagtgcataattcataagttatgagagtaccttgtgatggagttggctgccgaacttgtctaagagggagtttatcatcagcggcccgattaccgagttgaatccgtgcgcatatctatagggcagaaaattgcttaactgttccgatttccaaattgtgacgcttgccatatattacttcaacgcaattcgttcataacaggccaataaccgccatgcaagaaatcgaaaggcttatcgccaacaaccaagcctggtccgctaacatcaacaaggaagatcccggcttctttgaacgtttggctcaagcgcaaaaaccgcgattcttgtggatcggctgctcagacagccgcgtgcccgccgaacgcctgaccggcctggagccgggtgagctgttcgttcaccgtaacgtggccaatctggtgatccataccgatttgaactgcctgtcagtggtgcaatatgccgtcgacgtgctggaggtggaacatatcattatctgtggtcacctgggctgcggtggagtagaggcggcggtagagaacccggaactggggttgatcaacaactggctgctgcacattcgcgatctgtggtacaagcacagttccctgctcggcgagctggaaccggaacaacgtctggatgtgctgtgcgagatcaacgtaatcgagcaggtgtataacctgggccactcaaccatcatgcagtctgcctggaaacgtggccagaaagtgatgatccacggttgggtatacggtatccaggatggtcgtctacacgatctggaagtcaccgctaccagccgtgaaagcctggagatgggctaccgcaaagcgatagccacgctcaagcaggaaaaaggttctagcgccttatagtaggttcagcgccctgctgaaccccggccagattattcgtccagcatcaccactttgccgatgtaaggcagatggcgataacgctgggcgtaatcgatgccataacccaccacgaactcgtccgggatcgggaagccaacgtattccaccggcacttcaacctcacggcgctcaggcttgtccagcagcgtacaaatcgccagggacttcggcccgcgcaatgccaggatctcgcgcaccttgttcagggtgttgccggaatcgatgatgtcttcgacgatcaatacgtctttaccacggatgtcttcatccagatctttgaggatttttacgtcgcgggtggtagacatgccgctgccgtagctggaggcggtcataaaatcgacctcatgcggcacttcaatggtgcggcacagatcggccataaacatgaaagaaccgcgcagcagcccgaccagcaccatatcgctgccgctatcgcggtaatcttcggtgatctggcggccaagttcagcaatacgggtcttaacttcctgctcggaaatcattacttctacagtgtgtttcatagttttcaggtcagttgccggaagaagggcgcagagtttagcatagctggcgggcggtggcgacgcgagtgcgtcaccactttacacgctgcggcatggttagccgcagcctgggataatttaatcggctacagtgaagcctaacatcatgccggtatcttcatgttccagcaggtggcagtgggccatataggcctgatcggcactggccagatgattgaaacgcaccagcacttcgctgcgccaaccttctaccagcaccgtatctttccagcctgcccggtgggccgccggtggcttgccgttttccgacagaatacggaactgggtgccatggatatggaacgggtgcatcatcacgtcgccctcaccggaaatggtccatttctcgtatttaccgcgcctggcctcaaacgccggcttggccatatcataggctttgccgttgatggtattggcatggctgaaatcaaacggtttgctgccatgatccatcttgctgtggtccattcccgccatgttgctctgatccatgccttgcatcttactatggtccataccagccatgttacccgcggcattgccatgatccatgctcatcccggccatcgcctgatgcccatagcgatccatcagagcctgcatccccagcatatccagcttaggatccatcatcagttgcaaccagcgttcctgcaccccggccagcgatggcaatgcaggcaatttcaccaggctgtccggcatggatttcacgcccagcgccagtgatggttgaatatgcaataccggcagcggctgatcgaacggggccaacgtcatacccatttgcttcactggcagggtaacgatatcgaacggcttgccatcggaggcatcgaccaacacttcaaagcgctcgcccatcagtatcggcagttcggtcagcttaaccggttcgcccaggaagccaccgtcactggcaatcacgtataatggccgattgtcgctggtggacaggttaagcgagcgggcgttacagccgttaaggaaacgcagacgcagccaaccgcgtggcgcgatgtgttgcggataggcaacaccgttggtgaacatacggtcaccaaaccaacccacggccgcgctcatgatgtccaactgatattcgatttggccgtctttgcccaggcgcttatcttgcaggatcacgggaatatcatctgttccccaggttttcggcaagggcagttggctgctttcttcatcttccagcagcaccaatccgcccagccccatcatcacctgctggccggttttgccatgcgtatggggatggaaccagcaggtagacgctggctgatcggcagtgaaactcaccgtgcgggtggtgccgggttggatcaaggcctgtggaccaccgtcgacattaccggggatctccaacccgtgccagtgtaccgtgctggcttcaggcagtttattactgatatccaccgtcaccggcttaccccgttgcaaacggaccgctgggccaagcaacgcaccattaatcccccaggcgcgggtagccacgttaggcaaccagttcatctcaccggtttgcagcgccaacgcgatctttccttgtgcatctggcgtcaaaatcggtgggatcggcaaggctggacgatcggccgcccaggcggcacggctccacaatggcaaggcgcttgcggcacctattgcggcggtcagtttgataaaatcacggcgtaacatcgctggttcccttttctcagtgatcgaaagcttaaggtccgcagcctaaaccctccccttagtggaaggtcaagagctacgataaaggagtgttaagcccgcataattaatttggtgcctttacagccaagtgtggtaacgtcagcaaatattgaacaggtctatttcatgatgaaaaaaacaacgttgttgatgctgttgctgactatgctgggcttttccaatgccagcctggcgctgaatgaatccgaagcggaagatctggccgatctgaccgcggtgtttgtctatctaaaaaacgactgtggctataatgatttgcctaacgcgcaaatcaaacgcgccatcgtgtacttcgcccagcaaaaccgttgggatttgactaattataatagctttaatatgaaatccctgggtgaagacagctaccgcgatctcagtggcatcgctattcctacccccaataagtgcaaatctctggcgcgcgactccctgagtctgctggcctacgccaactaatcactcccctgcttctaccaaccctgccagcaatagccggctgggttggctatcgcctatctattgccctgccgacaatgctgtaatttgccacacggagggtttatgatgttgcgctcatttttcatggttgttattacggagtaacccgcacatgacccagaaagagatttggtatgaaacgttacatgccaactttggccagtacttctcagtagagcaggtactttaccgtgagaagaccgagcatcaggatctggtgatctttgaaaacccggtgctgggccgcgtgatggctctcgatggcgtagtgcagaccaccgagcgcgatgagtttatctatcacgaaatgatgacccacgtgccgctgctggcccatggccaggccaggaaagtgctgattatcggcggtggcgatggcgctatgctgcgtgaagtttgccgtcatcagggcgttgaacagatcaccatggttgagatcgacgcgggcgtggtggaattttgccgccaatacttacctaatcacaacgccggtgcctatgacgatccccgcttcaaactggtgatcgacgacggcgtcaatttcgtcagccagagcgacgaaaaattcgacgtgattatttctgactgtaccgatccaatcggccccggtgaaagcctgtttacctcggcgttctatgaaggttgcgcacgctgcctcaacgagggtggcatcttcgtagcccagaacggcgtttgcttcctgcaacaggacgaagcagtcaacagccacaccaagctcagccagtattttaacgacgtcagcttctatcaggcggcgatcccgacctattacggcggcatcatgacctttgcctgggccagccagaatccggctttgcgccagctggatgtcaccacgctgcaacaacgctttcatcaaagtggcttagactgccgctactacaatccggcaattcacgctggcagctttgccctgccgcagtatttgctcaacgcactgaacgtttcacgttaagcgagaagataggggctaaacctaattgcaaaagatcaaactgcacggctttaataacctgaccaagagcctgagtttttgtatttacgatatttgttatgccaaaaccgcagacgatcgcgatggctatatcgcctacattgacgaacagtacaatgccaaccgcctgaccgagatcctcagtgaaacctgctcgatcattggtgccaatattctcaacatcgcccgccaggactacgatccacaaggcgccagcgtcaccattctgatgagcgaagagccggtcgatccgaaagacgtggatacctctgagcacccagggccgctgccaaagacggtggtagcacatctggataaaagccatatctgtgttcacacctatccagaaagccacccagaaggcggcctgtgtaccttccgggccgatattgaagtctctacctgcggcgtgatttcaccgctcaaagcgctgaactatctgatccaccaattggaatccgatatcgtcaccatggactatcgcgtacgcggtttcacacgcgatgtagccggtgtgaagcattacatcgatcatgagatcaattcgatccagaactttatgtccgaggatatgaaggcgctgtaccacatgatggatgtgaacgtgtatcaggagaacatcttccacaccaagatgctgctgaaggatttcgatctgaaacactatctgttcaacgccaggccggacgagctgagcgaagaggagcggaaaaggatcaccgatctgctgtggaaagagatgcaggagatctactacgggcgcaacattccgcacctgtgatgttgagatacagggcagccgaggttgccctgtcagtcacaccagatgcaagcctgcgggtaaatccgccagctgctgttgtgcagtggcagccagcgccttatcggtgacgatatccgtcaggctgccaagcggtgccacacaaaataacgagtaggcagcgtatttactgctatctgccaacagcacccgctgggggggcttggccatcaaatcctgcttcaagcccgccttctcttcggttggggtggtaataccgtactcaatactccacgagttacagctgacaaacgcaatatccggatagatccctcgcagcaacctgcgcccatgatcgccgacgcaggactggctgctgtcatcaatacggccaccaatgatggtcacctcgatctgtttaaatcctgagagaaacagtgcgatatgcagatcggcggtgatcaccctcagcgggagatgtgtcaagtgccgcgctaactccaacatagtggtacccgcatccagcaccactgcatcaccggctttaaccatcgtggccgcaaattgggcgatagcccgcttctcctgcgggttacgcagctgtttttcgttagtggtaggctgtgtggggataaaacggttgagggccacgccgccatggctgcgattgatgatcccctgctcatccagcttgatcagatcgcgccggatggtggcaggagaagcatcgatagcgctgaccaattgctcaacggtgaccagattatgggctttcaggtaatccagaatctggtcctggcgagtttgtggcttcatgacgtccgtggtatcacgccaactgagtggctaatttaatcgagatcgccatgctctcagacttggctttacctgtccaggcaatatcaaacgcggtgccgtggtcggcagaagttcggataaacggcaggcccgccgtgatgttaaccccatcgtagaagcccagcagcttgagggggatatgcccctgatcgtgatacatggcgaccaccatatcgtactggccttcataagcctgcaggaagacggtatccggtgggcacgggcctgagacatcgatcccaagctgttttactgccgcaatcgccgggctgacgatgttgatctcttcatcgccaaacaggccatgttcacccgcgtgggggttaacgcccgcgaccgcgatccttggatgtttaaaaccgacgcgcttgaggaaggtatccgccatcgtcaccaccgtttcgatccgctcggcattcagcgtatcaaggaacttgcgcagggcgatgtgggtggaaacatggatcaccttcagcttatcggtgtacaacaccatcgcataatcccgactgtgggtcagttttgccaacaactccgtatggcctggatacagatgcccggccagatgcagcgcctctttattcagcggcgccgtggcaatggccattacctcacctgccatggccagttcggtggcacgctttacgcatcggtaagccagatcgcccgcttgtgcctgcactttccctggtgtcagcgctgcggggtcctctagcggttcatcaatcacgttgataataccgggcgcgaagcgtgcctccgaaacctgctggatcggcctcaactcgacctttggcacgatccccaatgcctgaatacgttgcaacgtttgcagacagcccaccacgaccgctggcgttcccgccaactcaccttcagacagcgccttaatgataatctctggcccaatgcctgccggatcgcccatggtgaccgcaatcgtgttatttgccactgtacatctcctcaataaaataaagtgcatcccgcagcgttgaagcgccgccaaatcctccggccttggtgatcactggcagatcgtcgatctcgctgttgacgaacgtgccacagggcacacaaggaacaacctcactggtaatacggtagccctccgctcccaacgctctggcaaccgcaatggcgatgtcgcctccggtcaggaacagaccgccaatctgggcctgattgataatcgccaaggtgatggagcctaatgtctggctgattttgtcccccaactgctggcgcgaaagatcatgcttttcacaaagcgtatcgatcatccggcgagcatcggcatctctgcaggtgcgtagcacgcagtgctgccgatctcgcagtacgctgacagcctgacgaataatttcatctaccgcagactggctgtgcggttgcaacaaggcttcaacatcaatatccagtatgccgagcgatttttcttctgcggcaaacacaatctgctgccgggtggcttcactcatcgatccggcaaccaccagcacgggcagacgctggcgagcggccagatagctgctggctggcaatgcatttgccaatccggcagcacctaccagcagataacggcagccgagttgctgaattgcctgtgccaactgcgccagatcgccatccgtttcggcatccactaccacaatcgctggcccgttgcggctcaagagcggcaactcgcggcctagctcgccactgcgtactacctgtaaattcaactcatggatcgggtaggccgtctgcaagccaatcaaggtcttgatatgagaagacacgatcggcgttttcggatcgctggcgaactcggtctccaccaacggcacgccgtgaacccggcattcgccattgagcgttacccgacctgctgcggggatggctgcggccacgatagccaactgcgcaccgctggcgaccatcgccgcctcgatctctgctcccacgttaccgcgaaaggtcgagtcgatttttttatacaccaagggcggggtatcgctctggcaatacgcccgcaaggcttcacttaccttggcgctggccattgcaggagataacgcccggctttcagtattgatcaccagcacatccgtacgccgggtagactgcggtagttcgttgagcaccacgtcggtacgcgcgcccttttttgccaattgcacgccggtatcgttagctccggtaaaatcatcggcaatcacgatcatcttcatgctgtctccttcagcgctacgcccttagcggcattacgcttcgccacccaagaactgagaatcggggtcagtatggcggtggtgatcaccgaagcggcaatcaacggggccgcagccgccgcgacgctagctaacgaaggatccgcctgggcaatcgccaatggcgtcgccaccgcatttccggcagtgctcgatgctgccgcaccggcaatacctgagccccccaccagtcgatcggcgcgaatattaaagaaaccgccgacaaaagtggtcaacacgccaagcagaaccccagccataccgccttgcagtaacatttccagattgatgccagcaccgagcgcgaaggcaaagaatgggatcaggattgggccccccttggtgaggaagtcgcgcatctgatgatccagattacccaacatcatccctaccagcaggggaaccaacaccgccaccaacgccatcaatgggatattcgccatacctgccgcacccagcgcgatcatggtgaagaagggcccgtcattcagggataggatcgaaatcgcccctacgtcccgctcattaccaaactcgccgaccaacgccgcatacaggccaccgttggagttgctcattgcggcaatgatcgccacgccggtcaggccaaaaataccatccgccccaaacagatgctcaacgcctagcccaagggccatggcaaccagcagtttggtcaaggtaatggtgccgccctgcaacagtgcctgcggagccgccttgaagctgataccggcccccatacacagcaggaaagcaccaatcagtggagccgcaccgtttttgaacagtgccgtggtganggtggtgaagccgccaatatccagcgcctgtggagcaaaggtgttgatcattgcgccaagcaccagcgggacgaccatcatccccccagggattttctctattgtcgccttaattttcatcctaccctcgtcattgtgatttattttaatcaaaatgattatataaaatcaaaaaagaaaaaatcggcgctgtgtcgcagattaaaaaatcagtgacatgattatttgattttatttaatcattacagaagggagaaaaggcggccgagaatcggccacctgggactcacaaggggagcagcatcctgcccccgtctggataatcagtagttgagcataaacgagcggtaggctttcagcaccgtcaggaagtcttcgataccgcagaaagagaggctctcttcgtcgtagtagttcatcccctcctccatctcgtcgccttcgaactccaactggttggcgcggatcatcacctcttcaccgtccatcagcaacgtgtattcatggccttccaactgccactgacgctcactgcccttgacccctgccgcaccggcttcaatacggtccagcaggttaaaatcaccgttgagctcttcattaatccaatggccgatggcctcatgccccatcgaaaatctgaccaccacctgaccggttacgtcacgcagaaattcgtaatccatagcatgccctcctgagcttttttataagtgtaacccttaattcgccactatctcagtgggcgctcgcaaagttgatcgattgggccaaataaactgcggcgcaatataacggtttatccttgggcttgggaaggctctctgtgcctgctatggacgggcaattgttgttatcatggctctcattagcccttacccaagcctgagccgatgatcgacagcgaaatcaccctgaaaaaattggaaatctttctggcgtttatggagaaggaaaacatcggccgagccgcagaacagcttggcttgagcagcgttagcgtgcatcgtgcattacatactctggaagagggttttcgctgcccgctgtttattcataaagggcgtaacctgctgcccctgcccgctgcgcaaacgctggcagaatacgcccgcgatatcgtggatctcacctacaaaggcatcgaagaaactcggctaaaggcggggtttggccagcaacgcatgcgtatcggcacgctctactcactgacgctggaaaccattccacggttgatcatggggctgaaggtacgccgcccggccatggagatcagcctgacgatgggatcgaatgaggatctgctggcccagttggggaaccaattgctggatgccatcctgatttcggtttcggacagccaaatcgatccgctgcgctttgagatcctgccactgtttgaggatgatatctatcttgccgcaccggcagcctcggcgctaaacagcgatggcacggcagacctgcaagacttccgcagccagaagtttgtctccctgaccgaaggcttcgccacttatcacggctttagcgaagcgtttcagattgccggttttgaaccggaaatcgtcacccgggtgaatgatattttctcaatgctcagcctggtgcaggccggggtgggctacacgctggtgccagggcgaatgaagaagatgtatgaacacacgttgaaattactgccgctgtgcgaacagtaccaaatgcgccaaaccatcgcgctggtgttcaaccgtaaccagcagcaggatccgaacctgctggcgttgacggcggaaggccgtatgtacgcacgcggtgaagggccggtttaatcgcgccgatatttggccacaatgccgcagaccgcgttcagccccagttggcaacgggacagcgcttccccctgctccatcacttttttggtcaagccggttaataccgcgcccggcggcatttcgatcgccagacggacttcccgttcgtaggccgccaccatcgcctcatgccagcgcacggtgcgggccatattgaaggccagatcgtcagcaatccgctccggctgccataacacgcgcccactactgccgctgagatacgcaacctgtggccgattgatggttacctgcttcatggcctgcgccagcttttccgccggttgtgccaacagggcacagtgggaagggacgctcaccgccaaacgctgggttttcgccgcaccggcggttttcgccaacgccatgacctgcaccattgcggcttcgctgcccgcgatcaccaattggtcttcggcattgatattggccagatagaccggtagctcagcgctgttgacctcggctatcagcctttccacctggcgtaacggcaaaccgataatcgccgccaggccatatcccgcagggtaagcctcctccattagctggccgcgtaacgccaccagccggacggcatcgggaaatgccaaagccccagcgatcactgcggccggaaaagcgccgatggataacccactgacaaagtcagcctcgaccccgtgctgctgtaattcccgcgcgtaggccacaccggctatcagcaggcacagctgtactgcccgggttttctgtaaggcttcggcgctgtccaacgccaatacgtcctggtcaagaacagcgcaagcctcgcttaacaaccgctgggttgtttcattggccggcagttggtgcagcatttgaggcacctgcggcccctgaccgggaaaggtaaataaaatcttcatcagatctcctgagagctggcccatggatccgtcgtcaccaacggcccctcagcggttttcagcatcgctcgtccatcccgcagccattcgctcagggcaaagccgccgagcggtgtttctatctgggcatcggcgcggcaaggcagcgcctgcaaccactgcgccagccgctgcaactcatcaaggctggcaggctgcggacagcgaaccaacagatccagatcgctatcggcatgcatcaccggaatttcggtcgccagcgcataaccacagctgccggtcacgccccagccccacggccaaggccgctgagccagcatgatgagcgcctgcaccggaggctgggaaacaaagctcgagtgcagcaatgccaagggttcactcaccaaagactccggagtcactatgcgccggatagcctctttgttaacccaagctgcggcgcgctggctgcgtttcataccccggatccccaccgggatccgcccgttgccctgaacatcgcgccgcaccaccagcggtaatgaggtgcgccactgctggctcacccactccggcaacgcctggtcggcgctgagggcagaacggtcactaatccaaatcaggtcatgcgggcgaatcatcggttgctccagttacatccctgaggtcagggtgataaacagcggtaaggtaatgatacacaacacggaactgatcagtaacgtggcttcggcatccggcgactgcacgccaaaacggttaccaaagacgataccgaagaagccggcggaaagggcgatcatcaaaatagcggtgatggccacgctaccgtgcaggcccaatgccagcaccagcccccaggcaataaacggttggatcagcagtttggttacgctcgacagcagtaccgggccgttgatctgcaacttacgggcagacaggatcacgccggtcaggaacagcgccgtcgccgtagccgacaggccaagcggtttgatcgcggccagcaccatttcaggcatatgaacgcctatcgccgacagcaccaccccaagcagcggcccccagacgatcggtttttttaccgagcgccacatcagcaccggcaacatgcccaggctggaaccctgaaccccaccggctgtacgggccttctcacgctcaaggatcagcaggcagaacggtgtcatcagtaccgaaccacaggcgatagccaccgccacagacaacgaggttcccggcgtttcccccagcacgctaccgaggatcggcaggcccagcgcggcatagttgggcaacgccacggtgagcgtcagcaccgcggcatcctgcggagacttatggaagatcccggtgcaggtaaaatagatcgccgcataggtgatccacatcgccagcaccaacaccacgatcagcggcgactgttcaacgatccccgcccaaggcgtttgtacggtggcaccgaacagggccgccggcagggcaaaatccatcacgaagatattgagtaatgaaacgttctggttatcgaccatttttgccttaccggcaaaaaagcccagcagcataatgacaaaaatcggtgccaaggcatgaataattacgtatgtcataaatcacctgttaaaaagaaaaaatcagtcagatcaggtgcgatggtgttagttatattgttatatgcaggtgaagctttatgccgggtcggaacgcatcacatgcgccctcccggcgggtcgtattttgttcctgaactctgacgtaaaaatggctagcgtggcattaccactctgcgcgcatacgttcacgcaccagcgaagagctatggcggttgtctgcccccaggcggttagttaaaccaacgccttcactgcgtgttttagcaatcgcctgaaccaccgagtggcgcaccagattaagctcctgctcactggcctgcagcgggtcacggatatccagtaactgttccagcaggcccagcgagctgtaatgctcgatgtcataggccatcggtggaatggttgctgccagcttctccagcgcctctacggagcgtaacgtgatgcgcgccgcagactctttgcccatcgcatggatcatcacgccagcatcgttgaaggcgatcaagcggttggcctgatagccgtgcgccagaaacgcgccggacatggctttcccgacgatcaaaccaatcaccgggtgaccggccagccgagccttggcataagccccggccgcaccggccaacgcctgatgaataccaaaggcctcttcccgacgcccgtaggcctggctcggcacatcgatcaccgccacgatagcgcgcttttgtgctttaccaacgtcggccgcgaccgcttcactgactacctgagctaacgtccaaccttccagcaaacctacttcaccgcgtgcggcgcgtgggtaatggttatttgcatccggcaccacggcgataaaacgtaccggttggccctctagttcagcgtccgcgactcggatcgaggcgcactgcccctggcgctgctcggcacctgccgtcagcaaagagaaccaatattctccacggcttgatgatgacgtactcatacccgatcctccgcagcaaacagttgagcaatgaccgccgagtccgcctgctggcgggtgtcgaattgcgacagtttcggcaagtagtagtgataattgtcggaacggtgctgagcaggcacgccgcgttgcaggcaacctgtcatcgcagccttgaccgcatgtaacgcatcagggacttcttcatcgacaaagccgctgcgatagcgcacatcgccaccggtcatgctccagataaaaggccgatcgcgggaatcgtattcttcgataccggcttcctgttcaattacctgtgggccgtttaagcccaggcgcgcttcacgggtgacaatcaggtagctgcataatgctgccgcgatcgacatcccgccaaagcagcccacggttccggcaataatgcccaccaccggggtatatcggcgcagatcgacaatcgccgcatgaatatccgcgatcgcggccagccccaggttggcttcctgcaaacgcacgccaccggtttccagcagcaatactgcctgagtcgcaatgccgttgcggttatcttctgccgccagttccagggccgcggccatcttggcaccggaaacctcccccatactgccgccctgaaacgccccttctaccgccactaccactgccggttgaccgtcaatggtgcctttggcgaccaccatgccgtcatcggcctgggtgactatgccttgtggctccagccaaggtgaagtaatacgctcaaatggccccaatagttcacgaaaactgccgctgtccagcagattacgagcgcgctcccgggcgctgagttcgataaagctgagatcatcacgcatgggcggcctcctcaaatacctgttcgatacgcaaccgagccacccccggcgtagcgccgaagtcgttaatctctaaccgtccggcaggtaaatcacgcaaagaagccaagcgttcaaacaggtgctgccaacgctgacgactaccgtctacggaggttttgatcgccaccgtcagcgtaccgtcagctgcaggctcaaacagagcctccatgtcaccggagcccacgactccgctcagtgccttacccggcagcgtaatgctggccggataactcaaatcgatatgttccataacatcctctggattgattattcagcgggccgtagcccgatcgaggaacagagccgcagccagcaaatcggctgcgccaccgggtgaagcgttactcgccaatagccgttgttccagtttggccaacgccgcctgccctgccggatgttgatatcctccggcatgcagtacctcggcggccccctgctgcatcgctttcagcgccgttagcccaccgcgcgacaacacacaggtatcgctcagggtcgtcatgatggccatcagcgcatcgatctgcgcggctggctcactggccccttggctcctgctgtgccacagctgcggcagcgcccgttgcatcacatgcggaaaaccttgctgggcctcttcccttgcgcctggaacctgatagcgttgagtggctcgcaagcctttactgaacaccttcgggctggcgtggtccggcaattgcgccaactgggcggctaatacgcagctgctggatggtgttgcgttacccccttgcatggctaccgccgtcaccagcaggcccatcgcccagatcgccccgcggtgcgtgttaacaccggcagtggctgccatcatccgctgttcaccttcccgaccaatccggccaacttcctggcgtaacgcgctatctgccggacgctgccaaccggcaatcgccagccgatggaagaccggcgtcaggctgtgagccgaacgttccatcaacgccagcgtcagatcctgatgcgcaccggagccccgggcatccaccagccccggtttcgggctgaggcgcgcctcatccactagcgcctgcgtggcaagctccgccaatcgtgcggcaacccgatccgcatcagaggcgattaaacagggggaaagtttcattaccagctccggaatttagctggcgggttatacaggccgccggaccactcgaccagatccgctacgctgcccgcagccagcaaagaacgcgaagcatcggtgcggcgaatatcgagatcttccgggaacaccactttgccttcacggcgcagttcagccacgcgtttggcgtccacacccagcccgatatcggtgataccggctaccgcagccaccatggcgcggcgctcttccaaagagcgtgcacgatacagataagcgatgccctcttcggtcagcacgtgggtcacgtcatcgccgtaaatcatcaccggtgccagcggcatgccagactcttgcgccacatcgacggcatcgagtttttcgacgaaggtcggtttggcacctgcctggaaggtttccaccatctgcaccaccagcttgcggccacgagccaacggatccggctcttcgatcatatccaaccaggcaggcgtagcgtggcgacgaccgtgtggatcgtgccccatgttcggtgcgccgccaaaaccggagaggcggccacgggtcacggtagaagagtgagccataccgtcgatctgtaaggtggagccgataaacatatctacggcgtactgaccggccatctggcaaaacgcgcggttggagcgcatggagccgtcactaccggtaaagaaaatatccgggcgagcggcaatgtaattctccatccccagctcaccgccaaagcagtgcacggtctcaacccaaccgctttcgatcgccgggattagggttggatgtgggttcagagtccagtgtttacagattttacccttcaggcccagctgctcaccgtaggtgggtaacagcagctcgatggcggcggtgttaaaaccgataccgtggttcagcgattgcacctgatgtttggcatagatacctttgatcgccatcatccccatcaacacatgcacgggtttgatcagacgcggatcgcgggtaaacagcggttcaataaagaacggcttgtctgccaccaccacaaaatcgatccaggaaccggggatatcaactcttggcagatccgtttcatcatcgaccagttcgttgacctgagcgatgacgatgccgtctttaaacgcggtggcctccaccagtgccggggtatcttcggtacttggcccggtgtacagattgccatgacgatcggccttgaacccggccactagcgccacgttcggcaccagatccacatacaggcgggaatagagttctatataagtgtggatggctccgatttcgagctgcccatcttccagcagttgggaaatgcgcaggctctgggtaccagagaaggcaaaatcgagcttgcgggcgatgcccttttcaaaaatatccagatgctcggcgcggccaacgcttggcatgatcatatgcagatcgtggaccttggtggggttgacctcggcgagcatgcgggagagaaaatcggcctgtttctggttattgccttccagcaccacccgatcgccagaaaccagcagtttttccagcacgctggtcagatcggcggggggggtcaatttgccctgcgactgcccttgcacactcgcgatacggcgttttttttcctgccgccgggtatcccaaacgcgcgtggggctttgatgaagcgacatacctcaacctcctgagtttacttggttcggtttagtacggttagagtaagagtctaggagagcgccatcaatcaagcagggggatggtttgttagcctgagagtaatgatttcatcaaaacaatactaatcaatcagttaatatcaataaaagcgcgagatgatcacaaaaaaacggggaacccaaaggctccccgtgatgatgctaactcagtaccgacttacaccgcggtttggaagatcacgccgtcggctttttccgtgtactgggtcaactggtcgaagttcaggtagcgataggtatccgccgccgtcttgtcgacctgtgccatataggtctgatactcatcaggcgttggcagacggcccagcaatgatgccactgcagccagctctgcggaggccagataaacgttggctccggtacccagacggttcgggaagttacgagtcgaggtggaaaccacggtcgcaccgtccgctacgcgtgcctggttacccatacacagtgaacagccagggatctcgatacgtgccccgctcttgccaaagacgctgtagtagccttcttcagtcagttgcgctgcgtccatcttggttggcggagccacccacaggcgagttggcagttggcctttatgctgatccaacagtttacctgccgcacggaagtggccgatgttggtcatgcaggaaccgataaacacttcgtcgatcttgctgttggccacgtcagacagcaggcgtgcgtcgtccggatcgttcggcgcacacaggattggctgcttgatatcggccagatcgatttcgatcactgcggcatattctgcatccgcatcgccttccagcaactgcggatccgccagccatttttccatcccctgaatacggcgctccagggtacggcgatcgccataaccttcggagatcatccacttcagcagcacgatgttagagctcagatattcggcgatcggtgccttatccagcttgatggtgcaaccggcggcggaacgctctgccgaggcatcggtcagctcaaacgcctgctcgaccttcagctccggcagaccttcgatctccagaatgcggccagagaagatattcttcttgcccttcttctctacggtcaacaggccctgctggatcgcgtagtaagggatagcatgcaccagatcacgcagggtgataccaggctgcattttgcctttgaagcgcaccagcaccgactcaggcatatccagcggcatcacgccggtagcggcagcaaaggccaccagaccagaacctgccgggaaggaaatgccgatcgggaagcgggtgtgggaatcgccaccggtacccacggtatccggcagtaacatgcggttcagccaggagtggatcacgccatcgccagggcgcagcgaaacgccaccacggttcatgatgaagtctggcagtgtatgatgagtggtgacgtccaccggtttcgggtaggcggcggtatgacagaatgactgcatcaccagatcggcagagaagcccaggcaagccagatctttcagctcgtcacgggtcatcggaccggtggtatcttgcgaacctaccgaggtcatcttaggttcgcagtattcaccagggcgaacaccagcaacgccacaggcgcggccaaccattttctgcgccagcgagaagcccttgctgctagccgctaccggcttggcaatacggaacacttcgctatgcggcaggcccagcgcttcacgcgctttggtggtcaagccacggccgataatcagtgggatacggccaccggcacgcacttcgtccagcagcacatcggttttcagctcgaagctggcaaccagttcgccggtttcatggttacgcacttcgcctttatacgggaagatgtcgatcacatcgcccatgttcaggttggagacgtccacttcgatcggcaacgcaccggcatcttccatagtgttaaagaagattggcgcaatcttgccgcccagcaccacaccaccgccacgcttgttcggcacgtaggggatgtcgtcgcccataaaccacagcaccgagttggtagcagatttacgggaagaaccggtaccaaccacgtcaccgacgtaggccagcgggaaacctttcttgttcagctcttcaatctgcttgattgggccaacgctacccggctgatccgggaaaataccttcacgttcgctcttgagcatggccagcgcatgcagtgggatatctggacgtgaccaggcatccggagcgggtgacagatcgtcggtgttggtttcgccagtcactttgaacacggtcacggtaatcttttccgctaacggtgggcgtgacagataccattcggcatcggcccaggactgcatgatctgcttggcgtgtgggttaccggctttggctttctcttctacgtcgtagaagttatcaaacatcagcagcgtatgggaaagcgccttggcagcaatcggtgccagcttttcgttatccaacgcgtcgatcagcggatgaatgttgtaaccgccctgcatggtgcctagcagttcaatggctttttcgggggtaaccaggggagaagtggcttcgcctttggcaacggctgccagaaaacctgctttgacataggcggcttcgtcgacgcccggtggtacacggttaatcagcaggtctaacagaaattcttcttcgccttttggcggattttttaatgattcaaccagcgctgccatttgtgtcgcatctaatggcttagggacgatgccctctgcagcacgctcggccacgtgcttacggtattcttctagcacgactttctcctcgctctcattgtcatttattgtgcctggcgttttatattcaaaccgggtttagcgcacggcgatatttgacggggcactgctgtcgatatcctggactgtaagtaaggtacagtgcccggttccgcccagccagcatatcaggatttgaatcggttgttaattcgttcacataaaagcaacattaaatctttgctgaatcgttgaccgcagcgtaatcggctgcaaagcaggcgggacgggcttgggttcgttacggcacaacagcaatctcagcccaatgagcacaacataacatccctacttttacaatggttatcgatagggctgggggaaattggcgggcattgggcacaaaaaaaccgccataaagacggttcttttgtatccgccggtgttagcaggcaccgaacggattttttacatcgttaaagaacgatacaagcactaccaagttccaccattctgcgtaaagatggttaaaaaatcaaccaatttgatgcaaaaaaacgctgttctatgtactctgattttgggtctgttctgccggtttagcagccggtcatcgggcttgagaacagtgctgcaactactgcgatacaagcattaccaagtgcttgttccaccggggctttcccggtgaagtcgcggtggtcgtggttccacaaggaacgcgcaatgaaagggagatcactcattatcctgctcattgtactgggatcggtgtttggcgtcagtaaaggtggctggtcagtttccggcaaccaactgatcttcaacgtcgtactccagaacaagtaagctactggccgctctttgagcggccttttatccgctactcaccaaataaaaacggcccctttacaggagccgcttatcaacctgatcaaccgcagaaattatttcttcttggctttcgggtttggcagatcggtgatgctgccttcgtagatctctgctgccaggcctacggattcgtgcagggttgggtgagcgtggatagtcaacgcgatatcttccgcatcacagcccatctcgatcgccagaccgatttcacccagcagctcgccgccgttggtgccgacaatcgcgccaccgatgatacggtgcgtttctttgtcgaagatcagtttggtcataccatctgcacagtcagaagcgatagcacggcctgaagctgcccacgggaaggtggacgtttcgtagctgatgcctttctctttggcttctttctcggtcatccctacccatgccacttctggctcggtgtaagcgatagatgggatcactttcgggtcgaagtagtgcttcataccggcgataacttcggcagctacgtggccttcatgcacgcctttgtgtgccagcatcggttgaccgacgatgtcaccaatcgcgaagatgtgcggcacgttggtacgcagctgtttgtcgacgtggataaagccacggtcgtcaacttctacaccggcttggccagcgtccagcagtttaccgttcggcacacggccaatcgctaccagcaccgcgtcgtagcgctgtggttctgcaggggcttttttaccttccatcgtgacgtagataccgtcttctttggcttctaccgcggtcactttggtttccagcatcaggttgaactgcttgctgatacgcttggtaaagactttcaccacgtctttatctgcagccgggatcacctggtcgaacatttcaaccacgtcgatctgtgaacccagtgcatggtatacggtgcccatttccaggccgatgataccgccacccataaccagcatgcgctctggaacggttttcagcgccagtgcatcggtggaatcccacacgcgtggatcttcatgaggaataaatggcagttggatcggacgggagcctgcggcgatgatggcattgtcgaagttgatggtggttgcaccattctcgccttcaaccactagcgtgttggcgccggtgaatttacccaggccgttgaccactttcactttgcggcctttagccatgccagccagaccaccggtcagctgattgatgactttctctttccagacgcgcactttgtcgatgtcggttttcggctcgccgaaaacgatgccgtgttcggccaacgctttggcttcttcgatcactttggcaacgtgcaacagtgctttggaaggaatacagcccacgttcaggcaaacaccacccagagtggagtaacgctcaaccagaatggtttccagacctaagtcagcgcaacgaaaagcagcagagtaacctgcagggcccgccccaagtaccacgacctgagttttaatttcagtactcatcatgacctcttaattgttttgtccggcgggtcagacgtcatttttattgctagtcgatctcataacgcccttcatccaccgggacgcatacaccgcgagcagtttacagaattgttaataatctgcaaagcgtgttcgagtgacccgtgtcccaacaattctgtcgagtcatgcaaaacccgacaaaactgctactgaattactaagggcgcagcatgctgcgcccttttttcattacatcaccagacggcgaatgtcggccagcatgttgttgatgatggtgataaagcgcgcaccgtcagcaccgtcaatcacccggtggtcgaaggagagcgacattggcatcatcagacgcggcgtgaactctttaccgttccagaccggttccatcgcagacttggagacacccaggatagccacttccggcgcgttaacaatcggcgcgaagtgagtagtcccgataccgcccaggctggagatggtgaagcaaccgccctgcatttcgcctgcggtcaacttaccgtcacgcgcttttttggagatcgccatcagttcacgggacagctcagtgatgctcttcttgttcacatccttgaataccggaaccaccaggccatttggcgtatctaccgccacaccgatgttgatgtatttcttcagcgtcagcttctggccgtcttcggacagtgagctgttgaagcgtggcatctgctccagggcagcggcaacggctttcatgatgaacaccaccggggtgaacttcacgtccagcttacgcttggcagcttcgtcgttctgctgcttgcggaacgcttccagatcggtgatatcggtcttgtcgaagtgagtcacgtgcgggatcatcacccagttgcggctcaggttggcaccagagattttctggatgcggcccagttcaacttcttcgatctcaccaaacttgctgaagtccactttcggccacggcagcatgcctggcaggccaccactggtagcggcaggagcggcttcggcgcgtttgaccgcgtctttcacgtaagcctgaacgtcttcgcgcaggatacggcctttacgaccggtgcccttcactttcgccaggttaacaccaaactcacgcgccaagcggcggatgactggggtagcgtgaacgtaggcgtcgttttcagcgaactcgcctttaccagcagcaggtgcagccgctttagcttcctgcttggctggagccggagctgcttctgctttctgggccggagcagcggcaggggctggtgcagcgccttccacttcgaacaccatgatcagagaaccggttttcactttgtcgccggtagcgattttgatttctttcacggtgcccgcgaacggtgccggaacttccatagaagccttgtcaccttcaacggtgatcagtgactgctcagcggcaactttatcgcccactttcaccatcacttcggtcacttctacttcgtcgccgccaatgtctggcacttcgacgtttttcgccgcgcttgccgcgggggcagcagccggtgccgcctgggtagccgcagcagcaggggcagcagaagccgcgccagccacttcgaagaccataatcagggaaccggttttcactttgtcaccggtgttgattttgatctctttcacggtaccggcgaatggcgcaggcacttccatagaagccttgtcgccttctacggtgatcagagactgctcggcagtcacggtatcgccaactttcaccaggatctcggtgacttcaacttcgtccgccccgatgtccggcacttcaacgtctttggctgcggctgcggcaggagccgcggccggtttttcttctgccttggcggctggtgcggcagcggccgcaccttctgcttcaaagatcatcagcagtttgcccgtctcggttttatcaccgacggcaactttgatctctttcaccacgccagcctgcggcgaaggcacttccatggaggctttgtcgccttccacggtgatcagcgattgttcaacttcaaccttatcgccaaccttcaccaggatctcggtgatttcaacttcatctgcaccgatgtccggcactttgatttcgatagacattgttcagtacctcttatgccagacgcgggttaactttttctgggttgatgtcgaatttcttaatcgcatcagcgaccacagaagcttcaatttcaccgcgtttagccagttcacccagagcagcaaccaccacgtaggaagcatcaacttcgaagtggtgacgcaggttttcgcggctgtctgaacgaccgaagccgtcagtacccagtacgcgataatcgctggctggtacgaaagtacgaacctgctctgcgaacagcttcatgtagtcggtagacgctaccgctggcgcctcgttcatcacctgagcgatgtaaggcacacgtggggtttcggttgggtgcagcatgttccaacgctcacagtcctggccatcacgcgccagttcggtgaaggaagttacgctgtaggtgtcagaacccacgccgtagtctttcgccaggatctgcgcagcttcacgcacatgacgcaggatcgcaccggagcccaacagctgtactttacctttgctaccttccagagtttccagcttgtagatacctttacggataccctcttctgcgccctgtggcatggctggcatgtggtagttttcgttcagcgtggtcaggtagtagtagacgttttcttgcgcgtcaccgtacatacgcaccaggccgtcatgcatgatcaccgcgacttcatacgcgtaagccggatcgtaagagatgcagttagggatggtcagagactgaatgtggctgtggccatcttcgtgctgcagaccttcgccgttcagggtagtacgccctgaagtcccgccgatcaggaagccacgcgcctgttggtcacccgctgcccagcacaggtcgccgatacgttggaaaccgaacatggagtagtagatgtagaacgggatcattggcagatcgttggtgctgtaggaagtcgctgcggccaaccaggaagaggctgcacccagttcgttgataccttcctgcaggatctggcctttctcgtcttctttatagtatgcaacctgctcacggtcctgcggggtgtactgctggccgttcgggctgtagataccgatctgacggaacagaccttccataccgaaggtacgcgcttcgtcggcgatgattggcaccaagcgatctttgatcgacttgttcttcaacatcacgttcagggcacgcacaaaggcgatggtggtagaaatttctttgttctgctcttccagcagtgagctgaaatcttccagagctggcatttccagcttctcggtgaaattcggcagacgagtcggtacatagccttgcagcgcctgacggcgttcgtgcagatacttgtactcttcggactctttctcgaaggtgatgtatggcagtttttcgatatcggcatcggccactggcacgttgaaacgatcgcggaagtggtgaaccccttccatgttcattttcttcacctggtgagcgatgttcttaccttccgcagtttcacccatgccgtaacctttgatggtatgggccaggatcacggttggtttgccttgggtatcctgcgcttttttcagtgcagcaaagactttcttcggatcgtgaccaccacggttcagcgcccagatttcgtcgtcggtcatatctttgaccagcgcggcggtttctgggaagcggccgaagaagtgctcacgcacgtaagcgccatctttggatttgaaggtctggtagtcgccgtccagggtttcgttcatcagttggatcagcttgccgctggtatctttacgcagcagttcatcccaacgaccgccccagatcactttcagcacctgccagccagcacctgcgaagatgccttccagctcgttgatgatcttgccgttaccggtgaccgggccgtccagacgttgcaggttacagttgatgacgaagaccaggttgtccagtttctcacgagttgcgatggtgatcgcacctttggattctggttcgtccatctcgccgtcgcccaggaaggcataaacggtctggccagaggtgtctttcagaccacggtgttccagatacttgaggaacttggcctgatagatggcgctgatcgggcccagacccatggagacggtcgggaactgccagaattcaggcatcagttttggatgcgggtaagaggacaggcctttaccgtgcacttcctgacggaagttgttcatttgatcttcggtcaggcggccttcaaggaaggcacgtgcataaacgcccggagagatgtggccctggaagtaaaccagatcgccgccgtctttctcgttgcgagcacggaagaagtggttaaagcagacttcatagaaggtcgcagaagattggaaggaagccatgtggccgcccagatccagatctttcttggaagcacgcaacacggtcatcacggcgttccaacggatagcagaacgaatacgacgctccagatccaggttgcccgggtatgccggttcgtcttctaccgcgatggtgttgacgtagttgttagccgcagcacccgctgcaacgctaacaccgcccttgcgggcttctcccagcacctgatcaatcaggaactgagcgcgttcaacaccctcttcacggatgaccgattcgatcgcctgcagccagtcgcgggtttcgatcggatccacgtcattgtttaaacgttctgacatggtggtattccttatctgtctaatggtttgtttggagcctgtcttcgtgcgttctgtcataaaacgcacgaagacaggctcatcagtttggttgccgcttaagtacttaactaagcactccgagctttatctctacaagctggtgtgccttgaagagaaccactcttaatccttgcgttgctggagacgccgcagcgatcgatcacgccgggtgtgttccctgctgagatccagcaaaatttcctcgataaacgccaaatggcggtgcgaggcttcacgggccttttcaggttcgcgtgccacaatcgcctcaaagatcccggcgcgatggctactcactgttgccaacatctcacggcgcgagtagagcaattcaaagttctgacgaacgttctgttccagcatcgggcccatacagcgcagcagatggagtaacacaacgttgtgggcagcctcggtcacggcaatttggtattgcatgaccgcgtcggcttcggcgtctagatcgccactgtcctgagcttgctggatcacatgatggcagtcgcggatgcgcgccagatcttcgtcagtcccacgcaacgccgcataataggcagcgataccttcgagggcatgacgggtttcgagcaggtcgaattgtgattcaggatgatcggccagcagttcagccagcggatcgctgaagctctgccacagattagtttgtacaaaggtgccgcctccctggcgacgcaggagcagccctttagcttccagacgctgaattgcctctctcagagaaggacgggaaacatcaaactgtttcgccagctcgcgctctggaggcagcttttcgcctggacgtagcgtaccctcgaggatcaggtattcgagctgctgctcgataacatctgacaacttgggttggcggattttgctgtaggccatgggtgatttcttctctgcgaagtgcccggagtcaattggtaataccaatttcaaaaacgtgacggtaaagtaacaaagtattcacctcctgtccatatgggccttgatcgaaatcatgaatgccgcacattttaacacttcaatccataagcctttgcaaaccggcaacccagcgttggtaataccatttacgaggtagtcgccaaatttaacttttgtgaaacctctggttagaagaatgccggggttatatggcaaggagattaagggttattttcgctttactaccgcttccccagcccctccccgttaacaaaaaaacaacaacaatggcgattatttttgccaattctgtgagttattgcttatttcgtgcacgcaatccccccgctcgtcacacaacccgcattttgttgcctaaactgctgcaatcttcatcattcgaacaacaaagcaggtgcaaactttcgcacataccattattctctgccaaacggtagcgacaccgtagaatttatagctataacgtcgtaaacaaaaaacaacacacatcgtaatcattactttacggtaatgggcattatgtcagcacagagggtttcattgatggatggtcaacagcatggcgaccagctaaagcgcggcctgaaaaaccgccatatccagctgatcgcctnaaaaacccgccatatccagctgatcgccttaggtggcgcaataggtaccggcctgttcctcggtatcgctcaaacaataaaaatggccggtccgtcggtcatccttggttatgcaattggcggttttattgccttcctgatcatgcgtcaactgggtgaaatggtggttgaagagccggtggctggatcgtttagccacttcgcctataaatactgggggaacttcgccggtttcgcgtccggctggaactactgggtgctgtacgtgctggttgccatggcggaactgaccgcggtgggcatttacgtgcagtactggtggccggagatcccaacctggatctccgctgccgtgttcttcctggccatcaacgccatcaacctgtcgagtgtgaaggtctatggtgaaatggagttctggttcgccatcatcaaagtagtcgccatcatcggcatgatcgcctttggggcctacctgctgttcagcggcctcggcggcccggaagccagcgtcaccaacctgtgggcccagggcgggttcttcccgaacggcaccatggggctgctcatggcgatggcggtgatcatgttctccttcggtggattggagctggtgggcattaccgccgccgaagccgataacccggaaaaaagtatcccaaaagccaccaaccaggtgatctaccgcatcctgctgttctatatcggttcgctgactattctgctgtcactctatccgtggggcaaagtggtcgaaggcggcagcccgttcgtgctgatcttccatgcgctgaacagcaatatggtcgcaacggtgctcaatatcgtggtgctgacggctgcgctgtcggtctacaacagctgcgtctattgcaacagccgcatgctgtacggcttggccaaacagggcaatggcccgaaagccctgctgaaagtggatagccgcggtgtgccggtagttgccatcggtttctctgcgttggcaaccgcactgtgcgtgctgattaactacctgatcccaggccgtgcctttgagctgctgatggcgctggtggtgtctgccttggtgatcaactgggcgatgatcagcctggcacacctgaaattccgcaaggcgaaaaaccatgagggcgtcgagccgaagttcaaggccttctggtatccgttcagcaactatctgtgcctggcctttttggctgccattctggtgatcatgtatctgacgccggggatccagatttccgtgctgctgatcccggtatggctcgccattctcggcatcggttacttcatcaagcagcgtggccaacgtgctgtaagcgcgaccaatacccactgatatcgttgttgacgatcaataggcccgcatgcgggcctattgtttttcttcaccattaatgggtgttgcgcagtgccttcacctgctcggcggtgatatccgccggcagcccgccccaagtgacacgcaggtaattcaccagctcggcaatttgcgcatcatccagacgatcggcaaagcccggcatgctctgcatactttcattaccggggaattgctgggctggaagcccatccagcaccgaaacgatcaggttcttgccgtctggttggcgtagcgtggcgttatcacgcatcgctaccgcaacatgcggtatacctgcaccatcacgctcatggcaggcggaacactgatcgagataggtgatacgcccggcatcgctgccctgaccgattttagcggccaccggctgcggtggcttgtcgcccatcaggtaggtcaccaacgcccgatgatcttccggcgtcaaatgacgagtgctgagatcgacgaccatgtgcatttcgctaaacgctgagccctgcggcgctaacccggtgctgaggaaacggcttagatcctctggtgtccagccgcgctgagccaaagcctgtggcgtgatatccggtgcgataaaccgccccagatcgccgccctgcatcggcttgctcagttccatctgccccagcatgccccgtggcgtatggcattcaccacagtggccaagcacgtcagacaggtaacggccacgctgccattcggcggagttcccctgcgagctggccggtaacggatcgctgttgcggaacagcaaattccaaccgatcaacgccatccgctggttgaacgggaatggcatatcgttggctggaatggccacatccaccgccgggcgcgacattagataggcataaatagcatccgcatcctcacgcgaaatgcctttgtaggaggtataaggcatcgccgggtacagatggcgaccacccggagccaccccctgcgtcaacgccaggaagaaatcatccttggtccagcgaccaataccctggtcggcggaaggggtcaggttgctgccataaatggtaccgaacggggtatccagcggataacctccagccagcggtgccccaccagcggcggtatggcaggcggcgcagtcggcagcctgcgtcaggtaacgcccacgggcaatctgttcgctgctggcggtaacctgctggactggtccgtcgtagctacggttttcccgccaccagagtacggcgatgacaatcgccgcaatcagcacaatcaacaatgcgagacgttttttcattacgccgtctccttcagcaggccaggggttttcaacaccacgtcacgcactgcctcgtaataacggacatagccggtacaacggcagatatggttttccaacgcctgctcaatcgcgccttccaactggtcacgcaggattggttcacgcttgagcttctcgacaaagatggtggccgcattgacaaagcccggcgtgcaatagccacactggaagctgtagtgatcgaggaacgactgctggatcggcgagagttcaaccacttcgccctgattatccacctgcgcaacgccttcgatggtgcgtacctgtttgccattgaaaaagtgagcaccggtgatacaggtacggatttcttcgctggtgccgcttggatggtcgaggatcgccacgcaggcgtggcaaataccctgcccgcagccgagacgtgagccagtcagatcgagatattcatgcagaaaatcgatcatcatcagcccttccggtacctcgatggggccatattgtttgccgttaatggtcagggtaatgggttgggttttaatgctcatggtaacacctcaagaatattttcggcacggacaggcaaatcacggaaacgatgaccggtggcatgggcaatggcgttaaccaatgcggcgaccactgggatcatgacaacttccgccattcctttcggcggatcggtttccgacaacgcaggcaggatgtcaccggtctgtttccagaccgccacatcgctggcgcgcggcaaatggtaacggttaaagttccaggtaccgttacccggcccatcttcgtacagcggtaaatattcatgcagtgcatggccgatccccatcgccaaaccgccctgcaactggccagaaaccagctcaggcacgatcaggttgccacactccatgatcgaatgatgattcagcagttcgaccttgccggtggcgatatccaccgctatttccgtcagcgtacccacggcgctgtaataggtcacagcggcgttattgcgttgtgtcggcgggtaataaacctgctcacgttccagagcgctaaattcgccgtggccagtgcgtatcgacaagccgtcgacaggcaggcgctcgctgtgattattcagcttgaagtccgcttccgcccactgccagcggttgaagacatgcaccaccgcaccggtcaggttgcccatctgataggctttcttcgccaacagctcaaacggcaatatctgcataccggctgccgtcaggccaccttccacccagcgagcatcttctttacgcaccaccagcggtgccgcctggccaccaccaatacccgactgccagatagacagcgcggcaggccacagcccctgttcaaataccaaccgggctgcttcacgcgtgctgtgcgagaaatagtaagcggagttgctggcgctggaaggagaacagtagcttggcgtccagttcgggttggtttgcagcttgtcctgctcatcctgcgacatcgtgtagggatcgccgctggtcaccatcggcaacagggaccaatcggtcaccgagaaatgagcctcatctgccggtttccccagccattgtgcacatagcaccgactgcgacgttgacatgccggtgcccatttcggccccgctgtgatacagcgagatacgcccgtcctcgctgaactccacgcgagcaaaggaggtttcagccccggtgccaaagtctttctgcacgcagccaaagcctacgccatagcgtttgccgggattcttactctcaaactccaccttacgctcggctcgtttgcgccacatctcatgctgtgaggctttcaccagcacttcatcggcgcgaatagcccctgccgggatcgccccctgggtatttttcatgccggacttaagcacgttgcgcaaacgaaactcgatcggatcgagtttcagctcctgtgccaattcgtccatcatcatctcggtggcggccatgctttgcaacgtgccgtaaccgcgtgcggaacccgcatcgatggcacgagaggccagcccgaccgaggaaagatcgcttttcgggaagtagtaaatcgactgtgccgccgtagcacccaccatcactaccgatggcgtaaagttacagcgcccaccaccgtcggcggtcattgccccttggaaggcctgcaatacgccggtctgtttgtctaccgcaatgcggtaatccatatcgaaggcatggcgtttgatcgaggtctggaattgctcatagcggtcattagccagccgcaccggtagcccgtcaccgtacagcgcggcaaccgcaccgtaatacgggaagttatagtgatctttcgagccgtagcccacggtgtagcacgggtgcaggattagctgtttaaccggctgatgacgtttggccaacatacgtggcatttcgtccgctacctcctgcggggactgggtcgggatcaccagatgcagggtctggctggcggtatcaaaccagccattggcgttgtccggctccagggccgaagtatcaacggattgcgtggtataacggcgtgacattaccaaccagtcctgcggtggggtttgcagttggtcggcaatcatcccggcgtaatacatgccttcctgatccagcttgccgccctcacgcccttccggccacacaggcagatgtctgcgcatcgaaagtgggaagataggagtatctttcaggctggagaagcgatcgtcatcgaatggcttttcacccccgacgcgcacgtagcggaagctgccccatggatcgcgctgtaacgggccggtttcagtaccatactggatcacttcgtcatggaatttcagcttgtctttggcaaagcggaaacgagcaaaatcatgatagatcaggattgccaccgcatggccgagataggctggggttttccccgtgggcagcagcatgtcatcgccataaaacgccgggaaggccaaaccatcacgctcaagatcttccgccgtcactatccgatccggttgcagatcgtcacccagcaaggaaagatcgataccggtaaacagacgatcggctttagtggcgcgcagaataaaggcatgagcctgctgctgcggccagtgtggcatatcaacggcacgaatatcgcgggcaaacactttctggcccatgaccttggagcggccatcgatacggtagcgaatgcgtttagtctgcgcatcccagttgggcgattgcaggatcttctgctcaaacagcgcggcataggcgcggctgtaaagaggcgcgaggtagactgacacccccgctatcacggcacccttgataaaacggcgtcgtgacgggttgaaattgctcataaaatatcctttacgttcttatctacccctagcgtccagatgcaggcattggtgccttaacccaaaggctggaggtaagtcgttttttatcggttttgttgcgcaaccgctggtaaccttgccgaagacgttataatcataagcttataaccaaaattatgtgagtattaacattttgttttcataaaatgaaacacttggaaacatgtaatgcatctatagtgtggctgatttgcgcaaacgcgggcaaaagagatgacaacaggtatcgtgattaccgccgccgggcggggtgagcgttttattcaggccggtggcagtggcaacaagcttaacgccctattgcagggcaagacggtgttcgcacatacgctgcaacaggcgctagcctccggtttaccggtgcaggtcgtcacccggccagaaaacctgccggtgcaacaggtttgtgccgcacatcaggttccctgcaccgtactggccagcggtgggctgggtgaatctattgccgctggcgttgccgcaaccgcaaactgggacggctggctgatccatttagcggatatgccttttgtctcgccgcagatctttgtgcaggtagcagcagcgctgagccaacacaacatcgttcgccccagtttccagcaccaacccggccatccagtggggttcaccgccattttgcgcaaacaactgtgtgcattgcatggcgataatggtgcgcgagagctgctacgcagtcacggggaggtttacctactccatctcgaccaaccgggcatcgtgcaagatatcgatctcccttcccagctagtagcaaatgagtccattaattaatgcaacaccttgatatcaccgtagtcggccaggcaatcaactggttggaacagcagccggtgtggctgtgtaccgtattgaacacttacggctcatcaccacgttctcctggcgcgttgatggtggcgacccgcgacggacactattgtggatcgttatccggtggctgcgtggaagaagattttttgcgccgtctggctgagggggaatatcaagccgccagtcaggtgatccgctatggtgctggcgggctaacccccagcgtggcgctgccctgcggtggcgtactggacgtattgatcgagcatctgcccgcaggccctgccagcattagctacttgcgtaatatcgccgaggccttggctggccatcatgccctggtcaagcacctgacgttgcccaatgcctgtagcgcgctggaaaccaccagctttgccagcgccacccaggtcgtgcgcaaccaacaggagatccagttgcacatcgccgccgctcctcggttgctgattgccgggctttccagcgtcgcgctgtattgcgccgactttgccagcgcactcggctttgaagtgttggtatgcgaaaaccgcccggaagctctggagaacttcgctacgcagctcaaaccgcatatcaccctgctgcgccagttcccagccaaattcattgaggaaggcggttgccatgccaacaccgcaattgtggcgctgacccacgatccacgcatggatgacttaaccctgatggaggcgatccacaccccagcattttacatcggtgcgatgggctcccaacgaaacagcgatcgccgccgccagcggctgcaacagatcgccgaattcagcccacaggaactcggccgtattcatgcgccgatcggcctgccgctcggcagtaaaaccccggcggagatcgcgctggccgtgatggccgatatcgtgcagcagaagaaccaactccgccaacccatttgaatacctgacgcgatccttcggctatgacaaatcattggccggtcaaaatgaaagcgattacacaaatttgcatataaaatcgccaaccctatttcaagccatggtttaacatctcatattcatgatgttaaatgccaaaccataagcgcgacaagtgtaaccgattacactaaatgtgatcgatagcacgttaaataatcacctagaccaataacattgcctactaacaaatcatctatctggttaaccgaggccgttatgagtacatcttcaacaagtaaaggcagatcgaatgcccaaatgaccttctttgtctgttttctggcagcactggcaggcttattgtttggactggatatcggcgtgatcgccggagcattaccttttattgctcatgagttccaaatcacttcccagcaacaagaatgggtggtgagctcaatgatgttcggcgcagcggttggcgctgtcggcagtggctggctctcttaccgactggggcgcaaatacagcctgatgattggcgccgtgctgtttgtcattggttcgctttgctctgctttcgctcccaacaatgatgtgctgctggtttcccgcgttctgctcggcctggcagtaggcatcgcatccttcactgccccgctgtacctttctgaaatcgcgcctgaacgcattcgcggcagcatgatttccatgtaccagctaatgattacgatagggatcctgggggcttatctgtccgatacggctttcagctacagcggttcatggcgctggatgctgggtattatcacccttccggctttgttgctgttcgttggcgtgttcttcctgccccgcagccctcgctggttagcgtcacgtggccgtgatgcagaagccaggaaagtgctggaaatgctgcgagatacgaccgaacaggcgaaagccgaactggatgagatccgtgaaagcctgaaaataaagcaaagcggttgggcactgttcaaagacaacaagaatttccgccgcgcggtctatctaggcatattgcttcaggttatgcagcagtttaccggcatgaatgtcatcatgtattacgcgccgaaaattttcgatctggccggttttgccaatactgcgcaacaaatgtggggaacggtgatcgtcgggttagtgaacgtgctggcaacctttattgctatcggcctggtggatcgttggggccgtaaacctacgctcaagcttggcttcctggtgatggccatcggcatggggacattgggtaccatgatgaatatcggcatgaattcgcctgcggctcaatacttcgcgatactgatgttgctgatgtttattgtcggttttgccatgagtgccggcccgctgatttgggtattgtgttcagagatccaaccgcttaaaggccgtgatttcggtatcacctgctcaacggcggtaaactggatcgccaacatgatcgtgggggccaccttcctgacgatgctcaacagcctgggcagcgcgcataccttctggatctatgccgggctgaatctggtctttatcttcattaccattgccctgatacctgaaaccaaaaatatctctctggaacatatcgagcgaaacttgatggctgggaaaccgctacgggagattggttcacactgatcgtggtctttgattaccgcccgtttcgggcggtatttacatccgcaacggcaatcaggagcgcggactggttttctctgcgaaggctttgtctggcactatcgggatgagatactcatattccaggtacagctcttcgtcaccatcgagcgagtagctatgctgcgcaatatcgtacccttcccggcgtaccagattaaactgcggcagaagtttggtataaacgctggcaatatgctcgtgaagggccaccggtttgccagcatagcgaaagcggcaataaccgccgctgatttccggtagttccagcaacgatttacctttggcgatcgctttgtctaccgcaacaaaatagtcgaccttcacccgttcaccatccggcgtaaaattggttagcgcataaagtttatctggatttaaattaaactcatcacaaaaacgatcctttattccatcacgaattgccgcgtgggattcgcccaactgttcaatatcgatgtgataagaataatactgaccgaccagcgagtagctgtctggttgaacctcaacataatcaatagagatatcgctaggttgattcagcgacagcgactgcaccagatggctgaaatcacaattccgtgccttgcgatagctgctgggcgtttgggcaaaatgttttttgaaacagcgtgagaatgtctgttgggaatcgaactgatattccaacgaaatatccagaatgcttttctgcgtaaagcgtaacgagaaggccgccagatagaggcgacgggcgcggatataagcagcaagtggcagggtggtctgttggcggaacatgcgctgcagataccatttggagtagccggatttttcgcaaacaatgtccagtgaaagtggattgcgtaggttgttttctatccagaccagtaattctttgatatgcgtttcctgcgtcaccattacttttcctagccaaaattgtccaaggcaatggtatacagatttatttagagcgtccaaagcgacgacactattttacaaaggctgacgaattcatcacaaacatcgcagcttgttactcaaagtacaagccgcccaccaggggcggctatcgctcagattacttcacacagcgcgtacattgagattcctggatcttctggaagaaatcattccctttgtcgtccaccagaataaaggccgggaaatcttccacttcgattttccagatcgcttccatacccagttcaggatattccacgcactccaggctcttgatgctctgctgtgcgagcaccgccgctgggccaccaatgctgccaagatagaacccgccgtgcttgtggcaggcatccgttacctgctggctgcggttacctttggccaacatgatcatgctgccgccgtgtgactgcaacagatcgacataggagtccatgcgccctgccgtggttggccccagagaacctgaagcatagccttctggcgttttggccgggcccgcgtagtagatcgggtgatctttcacgtactgcggtaaaccttcgccacgatccagacgctctttcagcttggcatgggcaatatcacgcccaacgatgatggtgccgctcagggaaagacgggtagacaccggatactgtgacaactgcttgagaatatcggccatcgggcggttcaggtccaccttgatcgcttccccttcacccgcgcggcgcagttcctgtggaataaatttacctgggttatgctccagtttctccagccagatcccctcacggttgatcttgcctttgatattacggtcggcggagcaggaaacccccatccccaccgggcaagaagcgccgtggcgtggcaaacgcactacgcgcacgtcgtgggcaaagtatttgccgccaaactgtgcacccaggcccaaattctgggcttctttcagcagttcctcttccaatgccacatcgcggaacgcctggccatgttcgttgccttcggttggcaacgcatcatagtatttggttgaagccagcttcacggtcttcagcgtggcttccgccgaagtgccaccaattacaaaggccacgtggtacggtgggcaggccgcggtgcccagagtacgcatcttgtcgaccagatagtctttcagcttacctggggacagcagcgccttggtttcctgatacagataggttttgttggccgaacccccgcccttggcgatacacaggaatttatactcgtcaccatccacgctgtagagatcgatctgcgcaggcaggttactgccggtattgacctcctggtacatatccagcgcggcgttttgcgaatagcgcaggttgtcttcgataaaggtgttgtataccccacgcgacagggcttcttcgtccccaccaccggtccagacgcgctggccctttttacccatgatgatcgccgtgccggtatcctggcaggttggcaaaatacccttggcggcgatttctgagttacgcaaaaattgcagcgcaacgtacttgtcgttttcactggcatcggggtcattgaggatatccgccacctgctgctggtgcgcagggcgcaacatgaacgaggcgtcgtggaaagcgtgctgggcgagcagggtcagggcttgcgggtcaaccttgaggacttcctggccggcaaattcgccgacggaaacgtggtcacggcttagcagatagtattcggtatcgtctttcttcagcgggaacggatcttgataatggaacggtttattcgacattgatctctcacttgcaacatcagctgcgttaaattcacacttacccagcgtgctcggggcgcgctgcgtcaaaaaaactccccacaccttacgtatttttaggtagtcagttattgcgccaaatcgcaaaataacctgtattaacgtaggtacttaacgctggcgatgtttttctgacctcatccggtgagaactgcgggtacagactcatcatgcacggattattatcccgcagttaacacaatgattacaatcgatgtgagtcgatcggcttatcattgtgggaaaatagctgcgtccatctagaaacgatttccttactgctcccgttgccagccgccgcatcattgcttaagctagcgccattatgaacagagtaagaatccccattgcgctgcaacaggcggtaatgcgcggcctgcgagacaaattgcagctggcgcggcagcattttgccgtcgagttcccagagcccaagatcctgtatcagcaacgcggcaccagcgcgggcaccgcctggctgcaagcctgggaaatccgcctcaacccagtgctgctgatggaaaaccaacagccatttatcgacgaagtggtcccccatgagttggctcacctgctggtcttccgccagtttggccgcgtgccgccgcatggccgggaatggcgctggatgatggaaaacgtattgcaggttcccgccagccgtacccaccagtttgagacccgctcggtacagagcaaaacctttccctaccgctgcgattgccagcagcatcagctgaccctgcgccgccataatagggtgatgcgcggcgagagcgaataccgctgccgccagtgcggtgaaaagctgacattttccggttaatcaacgccgttaacaataatatttataagttaaaacaatccattatctctatttgcacctgtcggtgacttccgttaccctgcctgcctttccaattttgagctgttttggaatatgcatcgcaaaattttatttttagtcgtattgacggcctccagcggcacgttagccaaggggattaataactttacccaagccaaggctgctgccgccaaaatcaaccaggacgccccaggtagcttttattgtggctgcaagatcgactggcaaggtaagaaaggcattcccgatctcgctagctgcggctatcaggtccgtaaaaatgcccaacgcgccgggcgtatcgagtgggaacatgtggttccggcctggcagttcggccatcagttgcagtgctggcaacagggtgggcgtaaaaactgcaacaaggatccggtttatcgccagatagagatcgatctgcacaacctgcaacccgccatcggtgaagtaaacggtgaccgtaataactttatgtacagccagtggcggggtggcgaagggcaatacggacagtgccaaatgaaagtggacttcaaaaacaagcaggccgagccaccggcccgtgcgcgaggtgcgatcgcccgcacctacttctacatgcgcgatcgctaccagttgccgctttcacgccagcaaacccagctgtttgaagcctggaaccgcctgtatccggtcagcgcctgggaatgtcaacgtgaagcacgcatcgccatagtacaagggaatcacaacccttatattcaacaggcttgtcagcagcaaaaaggctgacctactatagtgctttcgcgctgcccatcggcagcgccgtttcattgagccaggatctgacaatcattatgcgtaaaccccgcatttaccatccagagcccttgagcgccagtgcagaaattgcattgagcgaggatgccgccaatcatgtcggccgcgtgctgcggatgagcgccgggcaggcactgcaactgttcgatggcagcaaccaggtgtttgaggcagaaatcacccgggtggataaaaagaacgtgctggttcagatcaacgccgggcaactggaagatcgcgaatcccccctcaacttacatcttggccaggtgatctcccgtggcgaaaagatggaattcaccatccagaaatccattgagttgggggtcaacgtgatcactccgctattttccgagcgctgcggcgttaaactcgacggcgagcgcctggagaaaaagctccagcagtggcaaaaaatcgccatcgcggcctgcgagcaatgcggccgcaaccgcattccggaaatccgcccagcgatgactctggaacactggtgcgccgagcaggacgatagcctcaagctgaacctgcatccacgcgccagacaaagcatcaataccttgccgttgccggtagtcagcgtacgtctgctgattgggccggagggcggattatccgccgaagaaattgccatgaccacagactatggatttactgatatcctgctggggccacgcgttttgcgtacagaaaccaccgcgctcaccgcaattaccgctttgcaggttcgtttcggcgacctgggctaaggacctgtcttcacaggttcgtaaggagaagagatgatcaagctcggcatcgtgatggaccctatcgcatccatcaatatcaaaaaagacaccagctttgccatgctgctcgaagcgcagcgccgcggctgggaactgcattatatggagatgaacgatctctatctgcatgccggtgatggccgtgcccgcacgcgcctgctgaacgtgaaagaagacaaagcgagctggttcagctttggcagcgagcaggacctggcgttgcaggatctggacgtgatcctgatgcgcaaagatccgccgttcgacactgaatacatctatgcgacctacatcctggaacgggccgaagtgaaaggcacgctggtggtcaacaagccacagagcctgcgtgactgtaacgaaaagctgttcaccgcctggttcccggagctgacgccagacaccctggtcagccgcagcgctgcccatatccgcaaattccaccagcagcacggcgacatcatcctcaagccgctggatggcatgggcggggcctctatcttccgcgtgaagcaggacgaccccaacctgtcggtgattatcgaaaccctgaccgaacacggcagccgcttctgcatggcgcaaaacttcctgccagccatcaaggacggggataaacgcatcctggtggtggatggcgaaccggtgccatactgcctggcgcgtatccctgcccagggcgaaacccgtggtaatctggccgccggtggccgtggtgaagcgcgcccgttgagcgaaagcgactggaaaattgcccgtgcggttgccccaacgctaaaagagaaagggctgatctttgttggcctggacgtgatcggcgatcgccttaccgagatcaatgtcaccagcccaacctgcgcccgtgagatcgaagccgcattcccggtttccgtcaccggcatgctgatggacgccattgaaaaacgtctggccgcgaagtaggcagacgacgcgccctctctcattaggagagggcatgcattttacttcccaattgaattaacgccatgaatttacagcaccatttcctgattgccatgcccgcgatgcaagatccgcgcttcaaacgttcggtgatatacgtttgcgaacataatgacgacggagccatgggattagtgatcaacaagcccgtggaacatttcaccgtggagacggtgctggataaactcgacatcaagccttcaccgcgcgatccggcgatcagcctggataagccggtgttcgctggcggcccactggctgacgatcgcggctttattctgcacaccccacgcaaaggctttggctccagcattcagatctcaccggccaccatgatcaccacctcaaaagacgtgctggaaacgcttggcacgccaaatcaacccgccgatgtgctggtggcgcttggctatgctggctgggaaaagggccagttggaacaagagctactggagaatgcctggctgacgaccgaggctgacaccgacattctgttccacacgccgatcgccaaccgctggcgcgaagcagccaaccgccttggcatcgatattcgcagcattgccagccacgcaggacacgcctgatgactaaccgcaccattatcgccttcgacttcggcaccaaaagcatcggcgcggctattggccaggaaattaccggcaccgctcgggcgctggcggcctttaaagctcaggacggtgttcctgactggcaaaagatcgaacgcctgctgaaagaatggcagccagacctggtggtggttggcttaccgttgaatatggatggcaccgagcagccactgaccgaacgagcgcgtaaatttgccaaccggctgcatggccgctttggcgtgcagattgccctgcatgatgagcgcctgagcaccgttgaggcacgggccaatctgtttgaccatgggggattccgcgcattggataaaggcagcgtcgattctgcctccgccgtggttattctcgaaagctggtttgagcaacatccgggctgattttccgtgccggagcaaagcggctgaacatgatcgcgccagccgtcggcacaacatcctgctcagattcaggcaactcaagcgtatccggtagctcaaagctgtccaacgtgaggttgtttatgcggtacggtgtcagattgcttatcaacgcatagccccgccagtcggtagttacaccatactgattatcgacgccgatccccggcgtacccggcacgctgacgatagctatagtctctcctaacgtctgccccagcgtgaccccttcctgatgcgccatcaggctaccggagagttccatattctgctggcgataccctttgccttgagaataaccggcccgcacctcgccagcgttatattgataattgccgctcacgtccttgctgttgccgtatcgctggctctgactggtgctggcgttgtagctcaggctatagtcggaaagcaaggttccgctgacgcctatccgccggctgtcggtccgatcgttagccagcgtatgatcgtagttcagcttcatacgtggcacacccaatgcactcaacggcagcgagacagatagccccaactgggcctgttctttgccatacgaggggcggttatattccgcatacagcgcaacgtctaccttacccaggctggagctgaaacccatctcgacgctggtctcgcctctttgattaccccgagtggcctctcgaaccaacgtcaggtagaggctgtctgaatcggacagatactggttataacgcgcctccaggcgatactttttttcctcgtcaaagtcaccgacaaaaatgccgtcttcccagtcccaccaataggtgctctgctgatctatcgccgtgccaaacgtacgatatcgctgccgcggatagtattgtgccatcaggctgagggaagactcccaggcagggaaagccttggcgtaacgcatacgcgccatgccgccagtgtccggcgctgaacgcctcggctgacgggcagatgaaaacgtgtaatccgccgagatcgccccccagtggttaagactcttaccaatcccgactgccgcgctgcgataaatatcggccccctggaaaccaccatatagcgtaacctttcccggtaacccgtagctaagtgacgcctgcgcaaagctcggctgatcctcttccatgccgtagtagggttggtatttacccaccgtggcgtcgtagcgccactggccgacgtaaaccaggttaggcatggaggagtaaggaatttttcgttcagtttcggtgctatcactttcccgtattgtgacggtaagatccccctcaatcgcgggcggatagacatctttcaacacaaaagccccagggggaacaaacgtttggtagatcacttcaccgttctgccgcactctcacttccgcattgctgcgggcgaaacctcggacccagggcgaaaattgccgcaggccatccggtagcatccggctatctgacaccaggctcatgccacggaagcggacgttgtcgaataacgctgacggcgttacgctgtcgcctacggtcagtgtggcgcgccaggctttgatatcacgataggccaatgccttttcagtatgccaggtcggctctccccaggtatctttctgataaacaggttgataacgcagtcgccaagggccgatattggcaccagcggtaacatcggcatacaggctgtcgtgacgttgcgcagtgcggtagttttcacccgcataatggccataattaaactggtagttaacaaatgccgcattgataccatcatcccaacggccggctagcttgctgtcacccagtaagctagccgggatatctaccgtcagcaattgtgctatcggctcaaagaacaccccaatttttcgggcattcaatacgtcaggcagaatacagccctcaggggtcgtttccatcaccatcgcagcatcacgtatcccccactcacgtagcaatggggcattaatacacggctgctcatcctcccccagattaacggccacctcgcccttgaagttatcgttaataataagatagacgttatttatttcagccctggcaccgttaaccaacaggcctaacgacataatggcaatatgaaaagtgggtttcattcgttccctgagtgctaaccacaatatttacccaacacaaaaagaggcgcatctgcgccccttaattaccaaatcatggctgcttatttctgtgccgctgccagttcagcacgagcctgtttcagctcttgtttgatttcttttacgtcagcctgcttttcttgcagttttttctcgtacttagccactttcttggcgtcgcctttagcctgagcttcgcgcaggtcggctttaatttcctggacgtcttgctgcttgtcagccagtttctgttccagcttggtgactttcttctgagcgtcctgcagcacgctgccgttggtgcaattggcattcacttcgctcagagcgcgcttcagacccgctacgcggttgtagttaccatacttctcagcctgctggatctgatattcgatcgcagcacgtttggcattacagtcataagccgcattagccatggtagagaagctagcacccagaaccagaaccagtggcagaaccagtggcagaaccgctaatttagtaatttttttcataatgttatccttaaacgtcattacacatggggaacaccacgccccccttcctgtgcggcaaagaataaggtgaagcggattaccttaaaatctacaaaagccttaatcactctgtaggaagagactattctcctgtagtccgctgtactttcattagggtgttgagcatccgttgcgcttcccctagcaccgctgctgcggtttccagtacggggttgtcatgcaatgactgacaagcttgattcaatttttcagcattcaccaaccgggccgcaccggccaatttatgagccaacgcccgtatgcttatcaggtccatcggttgttgcttcatgtccatggcaagttgcgtgcagtcttcctgtaaacaatccagcaacgtttggatgaactcttgcaatacctttggctgacgcaattccgctggcaagtcttccacgacaaacgcaggctcctcttcactgcgctccgcatcagccactggcagcgtagacaatttcgcttttaatatgctcaggttaaccggcttgaacaggcagtcatccattcccgcctgcagacaagcctcccgtgcactttcttgcgcattggccgtcagcccccagatcaccgtaggagcagactgctgttcacgctcgaggtacctgatttggcggctcaggctgtaaccatcgcgttcaggcatctggcagtcggtgataatcaggttgaagctctcctgctccaacaactgcagcgcctgctccccatcccccaccgcactaggctgatggccaagaaactgcagctgttgggtcaacaacattctgcccgcaggatgatcttcaacgatcaggacccgcagttgggatgatgccaccggggctggttcctccagaggtgtttgaggggggaatttcagcaatctcggcaccgaaagcagcacggtgacgtcgctgccaatcccaacctcactgttcaatacgatggttccccccatcatctccaccagcttgcggcaaatatacagcccaagccctgtcccgccagcctctccattgccctgagtaaagggttggaaaagacgctcttgagtggctgcatcaatccccttgccagtatcagaaacacgtagccgcagatccgctcgctcttcgctaatctgatcgaccgcgacactgagcgtgacctgcccctgctcggtaaacttgatggcattactcaccagattggatagcacctgcttgaaacgcatgggatcaactaacacatcgccggtgatctccgcgtcaatatccaacctgaacgctaaccatttttggcgtgccacaccgtcaaataacatcgccacggcttcaatcaggcgacggatatctgcacgctgtggatgcaggatcagacggtccgcctcaatgcgtgagatatcaagaatgtcaccaatcaaggccagcagagaatgggcggactcatgtgcaacgttcagcagttctcgatctaaagcttcctcccgctgcgggcggttcagcaacagttccaacatgccgataatggcattgagcggagtgcggatctcatggctcatggtagccaggaaggtggttttagcccggttggcactgtcagcacgttccttcgcctgctgtaactgcgcaatcaggcgatcgcgttcggtcacatcgaaccacccgccaatttttccttcagcacgctgatcttcagtaatcagcaattggccccactgctgcaaaatgcgcgactggcccccaaactgcataacagataaaaccggttcctgttcaccgccccggccaatatccaacgcaacaggtaactgcagtgagtagttctccagtgagctaccgatcaccgtctctgctggaacattgatggcattaaaaaacggcgtattcgccatcactatctggtctttcagattggtgatgtaaatcggcaaaggcacgctatcgatgaccgcctggcaacgctgcaccaggcggcgattattgcgcaaccggctgataaccaagactatcaccagcattgccagcaacagaacgatcagtaaccacgctgtggaataacagtgggcaagcaattttccatcacccgaggtcccttcaagcaggtaggtattgttataccaattgctggtcatcgcatggatatcctctggggggatattcagcaatgccttgtcgaggatggtggcgagcgggtattcattaccagataccccaatgacaaaacgtgcgggttcagcatccagagcactcaaaatactcagtcctgaggtgggatctcgggccagaaagtaatcggcactgatcatcggcaataccagggcctctaccttccctgatcttaacgccgcaataccaacctgtggcgagcttacgccaatcacccggctggcgggatactgttcctgtagctgagcccgtaaaggatgccctgccaccagagcaatcaactgaggaggatcatgcttgatttgctgcggtattcccaccaacacccaggaattaaataaataggagcgagtcgttaacaaaccgttaggccagattgcatccagcgttacgccagccacaatgtcggctttgcctgctttgatggcattcaacgagtcttgtagtgagtctgcccggataatctcaaacttcagaccggtacggctggagattgcatccatcacatctgcagtcagaccacggaactcgccctgtacatcgaagaaacctaaaggagcaaaatcaccattgaccaccacccgtacgctggggtgttcttcaacccactttctttccagagaggtgagcaacaggtgctcttcccctagagacatggggatacccccattccaacggctttgtatctctgcgtgcgtactttcgggaatcttggccagcacggcattcaacacccgctgcaggcgcacattcttttgcgccagaccaaaggaaaaacccttgatatcctgcggtggcagcagttgcatgcgcagattattcagattgccctggttgatgagataacgggcgaccttggcatctccgataaaagcatccagctttttaaatgacagcgcctccagcgcccggcgtgggatatcaaaaacctggtactccgcagcggcaaaacgttcggtcagcttctgattgccgctatagagacgctcaatggcgatattttttagcggacgctgttgcagcagactgtcggtacgcatgatcagtgccggggaggcaagcacatagggagcagaaagcagcaaaccaggatcgtcttggctttttaccgcaacattgccgatcagatccaccttccctgtggccagatcgtgacgtaaggttgcgctatcctcgtagtaacgcacttttatctgcacgttcaggttataaccgacagcccccagatagtcagcattgatgccgccataatcccgcgtaccattggtgatatcaaaaggagggtaattcggggccgcaatgccgaaaaccagcacacgtttgcggcgcagccattgccaatcctcactggttaaatcaggctcagataattggatctggctgcgactaagcaggttaatttcacggaatgcctgaacgtcctctgcagaaacaccaaagcaaaaaaacagcagcaagataacgaatttatttaccatcagaacactcatcctgatgatgataaaaattaactaactcctcaggatgactaacttttaatttttccatcagacgtgtcttataagtgctgatagttttattgcttaggatcaggcgatcggcaatttccttattactaagcccctcggataagtaacgcaacaccgtcaattcacgatcggaaaggcgagtcagtatattcttattctgtagcggagcagtcagcaatggcaatagagtagcctgcggaaaacaagcatagccttgcagtaccagttggcacaacggagccaattgactaatgtcctgatctttgttgaagaagccgcgagctccggcccgtaacgctctttctgcatagctctctgcgggtaggctcgtgtagacaaccactttgatatcgctatctacttggcgaatatgctgtaaaatctgcagcccatccattttgttcagcatgatatccaggatcaccaactgcggcgtactttcctttattcgcgccagggcgtccaagccgttggtggcagtaagaattgaattatcacctaatggagataaaattgctttcacagcgaaacaaattgcggggtgatcgtcaacaatcagccaggaactcataagaatatccttatcctaatactaatcctaaaagtaacagccaaaagatagctgcttaatactgcaacggggttcgcacttaagttaccaatatacttcgctctcgcacacaacctctgtgctattgattacaattaaaaataagggggagaatagttaattgattgtggcattataatattccctgcgcaacacgctgttgcagaccctgttcaaaagtttgcatgcctgactgcgcaccggtttgcaatacgctgaccaactgatgagttttcccttcgcggatcatgctgctcaccgccgccgtggccgtgaggatctcgtaaatggcaacacgccctcccccgagcttgctcagcagcttttgggcgatcaccgcctgcaggctactggccaactgagcacgaacataggctttctcttccgccgggaaaacatccaccagccgttccaccgcctgtggcgcgctgcgggtatgcaaggtggccaagactaaatggccggtttctgccgcggtcaacgccagccgaacggtggtggtatcacgcagttcccccagcaggatcacgtctggatcctcacgcagtgcggcccgcaacgcatcgtcaaaactgtgggtatcccgccctaactcgcgctgctgaatcagggaacgctggctacgatggataaactcgatcggatcttccagcgtgaggatatggcggcgctgatgccgattaataaagtcgatcatcgccgccaacgtggtcgacttgccgctgccggtagcgccggtgacgagtatcaagccatcttcccgctgcagcagcgccggaataatttccggggtggtcagttcggccaacgtaggacactggctggcgatcctgcgtaacgccacggagaccccggtattctgcaaaaagaaattggcacgcagccgggtgccaccagcaagggctaacgccagatcgagctgccccacctgctggagttgttgccacatcgtcttcgacaattgcgtttggcaccatgcctccatctgctgttgactaaggatttccccgctttccacggcctggagttcaccatcgatacgtaacattggccgatggccggtacaaaggtgcagatcggaggcattatgctttacactaagagccacaaattcatcgatatccatatcaatctcccgggttaatcatgagcactatccaacagaatctgcaggatgtcaggagccgtattgccgcggctgctcaagactgcgcacgcattccagaagaagtgacattgcttgcagtcagcaaaaccaaacctgcggaggcgatcgcacaagccatcgccgcaggccagcacgcgttcggcgagaattacgtgcaggaaggggtagacaagatccagtattttgcccagcgacctgaaggggctggattggaatggcactttatcggcccgctgcaatccaataaaagcaggctggtggcagagcactttgcctggtgccacaccgttgaccgcttgcgtattgccctgcgcctgagcgatcagcgccccgcagaaatgccgccgttaaacgtgctgatccagataaatatcagtgacgagcagagtaaatctggcattgtattgagtgagctgccagcgctggccgaggcggtagccgcattgcctaacctgtgcttgcgtgggttaatggccatcccagcaccggaacacgactatcagcgccagctggcgacattcggccagatgaacgacgctttccaggagctcaagcagcgctatccgcaggtggatacgctgtcgatgggcatgacagatgatatgcaggcagcgatcgccgctggcagcacgatggttcgtatcggcaccgcaatttttggtgcccgtgactactcgcacaccaccgtataacgaggatttgatgcaacatcgcaaaattacctttattggtgccggtaatatggctcgcgctatcattgcgggcctggtcgccggtggctatccggcagtcgccatcagcgtttgtgcgccgtcagcaaaaaaccgtgacgccctggccgccgaatatggcatcaacagcagcgcagacaacatcacctgtgcacaacaggccgacgtcgtggtcctggcggtgaaaccgcaaatgatggcgcaggtttgcttacctttacaggaacaggtcgatttctccggtaaactggtgctgtcgatcgctgcgggtattctggtgagccgtttctatcaaatgcttggtgaaggcttgaatatcgtgcgcatcatgcccaataccccttcattagtgggtaaagggatgagcgggctgtatgctcccgagcaggttagccaactggatcgtgattacacccgcgatctgatgagttcggtgggtaaagtctgctgggtcgatgacgaaaacggcattaatggcgtgattgccgccgcaggcagcgcaccggcctatttcttcctgtttatggatgccatgcaacaggaagccgaacgtatggggttcagcagccaggccgcgcgcgatctggtgcagcaagccgctatcggggctgcggcattggccgccgctaatccagagatctcgctaaccactctgcgtgagcaagtgacctccaaagggggcactaccgccgaggcgttgcgggtattcaacgaacaacggttgccagagaccgttgccaaagccatgcaggccgctgtttcccgtgcgcaggaaatggaaaaatcattttaactatgcccgatgagtttcaggccgccaaggtggtctgaaaaccaaggggataacccagaagttaaggagaagggtaacttacatgctaacgctgactttcctggtcaaaaccgtcgttgatatttacgtgatggtgctgctgttgcgcatctggatgcaactgacgcgcactgacttttataacccgttttcacagtttgtggtgaaaatcacccagccgatcgtcggcccactgcgccgcatcgttccttcgatggggccggtagatagcgcctcattgctgttggcattcctgctgatgaccatcaaatatccgctactactgctgatccagagcggtaccctgtcactcagcctgtacaacttgctgtttggcctgatttctctgatcaaatccgtcggctacctgatcttctgggtgatgatcattcgcgccttgatgagttggatcagccagggccgcagcccgattgactatgtgatgttccagcttaccgagccgttaatggcccctatccgccgcgtgatcccggcgatgggcggcattgatttctccgcgatggtagtgatcctgatcctgtatctgatcaactacctggggatggatctgtttggcgagctctggttcctgctgtgagtgcagtcaccacgcacctggacgggctggtggtcaggctatatattcagcccaaagccagccgcgatcagattattggcctgcatggcgacgagataaaagtcgccatcaccgcaccgccggttgatggccaggccaatgcccatctcatcaagtttatcgccaagcagttcaaagtggcgaaaagcaacgtgctcatagagaaaggcgaactggggcggcacaagcaactgcgcatcctcaacccgcaacagatcccggacgtcatcacggcgctgatcgaataatttcaaggtatctatatatgcaaaaaatcgttcttgccaccggcaaccccggcaaagtgcgtgaactcgccgaactgctggccgatttcggctttgacgtggtagcgcaaaccgagcttggcgtagactccgccgaagaaaccggcctgacgtttattgaaaatgctattctcaaagcccgccatgctgcgcaaatcaccggcctgccagcgattgccgacgactctggcctggcggtcgatgccttgggcggcgctccgggtatctactctgcccgctacgccggtttagaggccagcgaccagcagaatctggacaagctgctggtgacgctgaaagacgtgcctgcgggcaagcgcggtgctcaattccattgcgtgctggtgtatatgcgccatgcagaagatcccaccccgctggtattccacggttgctggaacggtgagatcacttttgaagcggccggcgttggcggcttcggttacgatccgatcttctacgtaccagatttgggctgcacagcagcagagctgacgcgggaagagaaaattgccatttcccaccgtggcaaggcgttgaagttgatgttggaagcgatgcgtaatgccagctaacagcgtacaactgcccccgctcagcctgtacatccatattccctggtgcgtacaaaagtgcccatactgcgatttcaactcacatgccttgaagggcgaagtcccgcaccaggaatatgtcgatcatctgctggcagatctggatgccgatttgccgctcgccagcggtcgtgcaatcagcaccatctttatcggtggtggtacgccgagcctgttgagtgccgaagccatgcaagcgctgctggatggcgtgcgggcgcgcattcacgtcgaggatgacgccgagatcaccatggaagccaacccaggcaccgtggaggccgatcgctttagcggctaccagcgcgccggggtgaaccgcatctcgattggcgtacaaagctttagcgccgagaagttaacccgtctggggcgcattcatggcccggatgaggccaaacgcgcggcgcatctggcaaccggcctgggcctacgcagtttcaatctggacctgatgcatggcctgccggatcagtcactggaagaagcgctggacgacctgcgtcaggctatcgctcttaatccgccgcatctgtcctggtatcaactcaccatcgagccaaataccctgttcagctcacgcccgccggtattgccggatgatgacgcactgtggaatatctttgaacaaggccatgagctgttgagtgccgccggttatcagcagtacgaaacctctgcctacgccaaaccgggttatcagtgtcagcacaacctcaactactggcgctttggcgactatctggggattggttgtggcgcacacggcaagctgacctttgccgatggccgcattctgcgcaccgccaaaaccaagcatccgcgcgggtttatgcggggtgactatcgggacaagctgcatgaagtcgaggcgcacgatcggccattcgagttctttatgaaccgcttccgcctgctggaagcggcgccacgcgccgagttcgcccaatataccgggctggatgagagcgtgatccgcgcaccattggacgaagcgctagccaaaggctatctgcaagagacgccagagtattggcagatcaccgagcatggcaaactgttccttaattcgctgttggaacttttcttgccggaagaatagcttaggtagaattgcaggctcaactgtcacacgcttatctggcaggggtaataggttccgtcgagttaagagtgcagcgcttaaaacaacggaacctgttgacgtcaaaccttagttaagcgccttaaccagatccttacgctgggtttccagagccgttacgcgcttgcacacgtcgcgaccaaagttctggaagtcctgctcctgattattccattcgttcttgatggcctgctgtagcccacccagattgcccatgatcgcctgcaacgggttgccattgctgttggcgacctgcttgacgcccatttcgttcaggctgtcctgcaatacgccgcccatgctctgctgcacgatattgcggccatcctgctccacctgagcgattgccttgtggtggaacgtgagaccgtcgctgcgatgttcgatgatacggttcatctgctgcttcaactgatcgttgagcgtggtcaggcggttacgcacgttgctgtcagtacccaactcctgaacgatgactttatccagcgctacccgcgccttttccagatgctgctgcgcgccctgatcgatccaaggtaaatctttacgcaatgcgttctggtagctgaacgccttctggcgctggttatcgttcaggctcaatgctttgccatcacgagtgacgtcgccgtcggcggtgatttgcaggttaccgccagcccccaccacctgcacggtctgtgggctgataatcacgtcgtcctgtggcctgacgctgcactgatactcggcatgcgcctgtgaagccgttaacaacagcaaggccaatccggttctctttaacatagtttctcctgactcccttccaaccgcatgtgcgatggagttaaaaaatcgaacggctaatgcgttgagacaacagttctagtgccgcagttcccgccaatgagttaccggatgcatccagctccggcgaccagacgacaatcgacagttcatcagggacgatggcgataatcccgccgcccactcccgacttgcccggcatgccaacccgataggcaaattcgccagcgccatcatacataccgctggtcatcatcagggcgttaatttgccgggcctgcaaggggctgatcacctcttcaccatcaagcgttcggccctggttagccaggtagacaaagctgcgtgccagctcaacgcagctcatccgtaacgcgcagtagtgaaaataggtttgcagcacggtcagcacgtcattgtcgaagttaccgaacgacttcatcagataggcgatggcggcattgcgatcggaatgctcaaattcggaacgcgccacgcgaatgtcatacgacagatcatcaacgcctgccagttggcgcaccacttccagcatccgctgcttgggagcactaagccgggtttgcagcatatcgcatactaccagtgctccagggttgataaacgggttgcgcggtttgccctgttccatctccaactgcagcagcgaattaaacggcaggccagagggctctttccccacccgctgccagatttcaccttcctgataacgcgttagcgccagcgtcaggctcaataccttggagatcgactggatcgaaaagcgctccgtcgcgtccccggcctgaaacagctcgccgtcaacagtacagacggcgatcgccagccgatcggcagcaacttccgccagcgcgggaatatagtctgcaaccttgccttgcccaatcaacgggcgtacctgttgcaggatctcctccagcaacgcgttatctaatgttgttaccaccgcgctcactactccagaaaggacaccagataaaacaaaggtgccattaaggcaccttcggcaatgctaatcggacgggatcaatcccaccagatgtcgaacagatcgctggttttcacatcattcagcttacgtgcttccagccagtttttgatcagctcacggtgttcttcagtgcaatgaccaatcttctgcaggcagatcaaaccttcccactgcaggtagccactaccgtcaaacgccaggccgttcggctcgatcacttcatcgataaacgcgtccagggtgctgtcgatatcttcaacggcggtcccttcggcaaaacgccaggcgacggagaagcccagttcctgaaactcttcgatatgcaactttttacgtaaacgacgactacggttcttagccattattccatcctctcaaacatcaaatcccaaacgccatgtcccagacgctggccacgtaattcaaattttgtcagcggacgcgagtccggacgcggtacgtaatcattgctctcggagagattacggtaacccgcgctgctgctcatgacttccagcatgtgttccgcatagggttgccagtcggtggccatatggaatacgccaccgacttttaatttgcgctgcaccagctcaacaaacggcgtctgtacgatgcggcgtttgttgtggcgcgccttgtgccacggatccgggaagaacaactgcaccatatccagtgaagcgtccgggatcatattctgcaagacttctaccgcatcgtggcacatcacccgcaggttggccaactccgcctcatgagcatcggccagacaggcacccacgcccggcgaatggacctcgatccccaggaaattctgctgcgggttattgcccgccatggtgaccagcgaagcccccatgccaaaaccaatctccagcacggttggcgcttcacggccaaacagcgcggcgatatcgacaggttcagcctgatattccacgcccatcaccggccaatagttgtccagcgcctgctgctggcctttggtcaaccgcccctggcggcgaacaaaactgcggatacggcgcatcgcgcggccgttctcatcaaattctggggagatgacgtcattaatcatagtgctttctgtctatttggctgccaattaggggaacgcgcattatgcaaagataccttgctttagcaagcgttcatcatcataccggatgtgctactgcggaaagttccggtttacagcaccatcactctatgctgcaatcgcgcatcattatttatctgccggatagcgaactcgctcatgatgcaagcacaacagttctcgcacgtagtgcttgactggtaccaacgctatggccgcaaaacgctgccgtggcaactcgataaaacgccttatcaagtatggctctctgaggtgatgctgcaacaaactcaggttgccaccgttattccttattttcagcgctttatggcacgctttccgaacgtgcgagccttgtccgaagcgccgcaggatgaagtcctgcatctgtggaccgggcttggctattatgcccgcgccagaaacctgcataaagcggcgcagaccattgtcgcacagcacggcggtgagttcccgacaacctttgaagaaattgtcgcgctgcctggcgtaggccgttcaactgctggcgccattctctctctgtcccaggggcagcactacccgatcctagacggcaacgtcaagcgcgtactggcccgttgctatgccatagctggctggccgggcaagaaagaggtggaaaatcgcctgtgggagatcagcgaagaggtcacaccggcaaaaggggttggccagttcaatcaggcgatgatggatctgggagcgatggtctgcacccgtagcaaacccaaatgtgagctatgcccgctcaatatcggctgcatcgccaacggcaacagcagctgggccaactacccaggtaaaaaacccaagcaaaccctgccggaaaaaaccgcctacttcctgatgctgcaacagggtgatggcgtctggctggaacagcgcccaggaactggcctgtggggcggactattctgcttcccacagtttagcgcgcggatcgatcttgaactctggctgcaacaacgcggcctgcaaggtagccgtttagagcaaatgcccgccttccgccacaccttcagccatttccatctggatattgtgcctatgtggctgaacatcgacaaagcgggtagcgccatggatgcaggttccggtctctggtataacttaacgcagcccccttcggtcgggctggccgcgccggttgagcgcctgctacagcagttggccaaacagtccccgacccaacccggtttatttggcaacagcgccattgacgaggaattagcatgagcagaaccattttttgtaccttcctgcagcgtgacgccgatgggcaagactttcagctctatccaggggaagtcggcaagcgcatctacaacgaaatctccaaggaagcctggggagaatggatgaagaagcagaccatgctgatcaacgagaaaaagctcaacatgatgaacgtggatgaccgcaaactgctggaacaagagatggtccgcttcctgttcgaagggcatgaggtccacatcgaaggctatacgccaccgagcgaataagattttccgggccaggcgctggccctttccccctgtttaattcttcgcgtatacggctttaacaagatgaagaaaatgttagctttgctagtgatagcgcctttgctgatctcctgttctggcaaaaaaaacgacgtggtcagtgaagcctatgtcaaagacaccaacgcctttgatattttgatgggccaatttgcccacaatatcgagaacatctggggactgagcgaagttctgattgccgggccaaaggactacgtcaaatataccgatcaatatcagacccgtagccacatcaactttgattcgggcaccatcactatcgaaaccatcgccaccaccgatcctgctgctcatctgcgccaggcggtgatcagcaccctgttgatgggtgacgatccaggctcgatcgacctctattccgacgccaatgatatccagatcagcaaagagccgttcctgtacggccaggtactggataacaagggccaacccatccgctgggaatggcgggcggcgcacttcgccgactatctgctgcaaaacaagctaaaaagacgcacatcgggcttgcacgtgatctactcggtgacgatgcaactggtgcctaaccacctggataaacgtgcacacaaatatctgccgatggttcgccaggcgtctgagaaatacggcgtcgaagagtcgctgatcctggcaattatgcagaccgaatccagcttcaacccgtatgcggtaagcggttccgacgcgctgggcctgatgcaggtggtgcagcataccgccggtaaagacgtgttccaaagcaaaggtaaatggggcacaccaagccgcagctacctgtttgatccggagaacaacatcgataccggtactgcctatctggcgatcttgcagaacaactacctgggcggcattcagaacccgacctcacgccgttatgcggtgatcaccgcttacaacggaggggctggtagcgtgttgcgggtgttcaatagtgacaaagcgaaggcggtaaccatcatcaacagcatgcagcctggtgatatttatcagactctgaccaccaagcatccggcgggggaatcgcgccgttatctggtgaaggtgaacaatgcacagaaaaactaccggcggaagtaatcgttggtgggaaaatacggggctggggggagacatgtttcccctc

SEQ ID NO: 323 - DNA, 28558 bp, unknown
  Altogen  635822 strain
  misc_feature (15637)..(15637): n is a, c, g, or t
gaagtgtggtcaatgcgtggacacgcttagaaataaatccatttatttcaaatgactaaggtaagtctttcaggccacttcggtggcctttttgttggctgcaagtgccagtagcctacatcaataaacctgcgccattgcggccaatttgagtacaataaattgcaggatcactaaggaatactattatggacgatattcagcgctggcggtccagcgtagggagaacgtggttactgggcgcgatgctgctggtggggagttttactgcctcggtaaatgccacgaccccagagaactaccatcaggtctcgccagaactctaccgctcctctcagccctccgctgcccagatgcaaacgctcgagcagcagggcatcaaaaccgtactcagtttacgccagtggcatgacgacgacagcgaagcgagaggcacaggcttgcttctgcgccgggtggcgatcaatgccgccgtaattaatgacgacatcgtggtgacggcgctcagagaaattcgttttgccctgaaaccggtgttggttcactgctggcacggcagcgatcgtaccgggctagtggtggcaatgtatcgcctggtgtttgaatattcggataagcctgcggtgctggccgaattgagaaagccggagcatggctatcatgaaaaatattatgccgggattgcgcgctatattggtgatgtcgatgtcagcaagatacggcagcgggtttttgccgataaccttggcaaggggaagtgatttgctagaaaagggggtgactggctatggcgaccgtcccctcaccctaaccctctcccacagggagaggggactggccgtgctaccaattggcccctttaccggtttacaacaccgtatcgatttccttcgtgaataagctgcagatggcttcctataactaaatacaggaccgtatcaattcctctcccacaggaagaggggacctacagtgccacggattagctcttgcctcccacctccgcactcgcttaacgccccccgttctgacctagtcaaaatgccaaaacacagcaccgttgcagctccctctccctgcgggagagggttggggtgaggggaagctcgattgcctgaccgacaatccgctatttctccccgtgtgttcatttactccacccaatctgactctgataaatcgttcgatccttccctagcgtaaatcccattctcgtttaagctttgtgtaaatttttgcggctttttgtatggaattttagtttcaataacgttaactattggtatcttccgaccgttaaaccgagcttaacgggatagggaatcgttgggtggtgtgccgtgctcggcatactcatggtcgtattttggggttctgaagtcatcatgaaatatatcattctgattttattaattttgtgcgttatttacattcattatcgtggccgtgttcgctatcctttttggcgtcagctttccgaccattccacctttaccgcaccgctgaacgtatttatgtacctgttctcacgggtgccgaccacgccttacctgcaaccggagcagtttcccgatcttattatcctgcgtgacaactggcagaccattcgtgaagaagggaagcaattgatggagatccagcaaatcaaagcgtcggacaagtttaacgacgccggattcaactccttcttcaaaaccggctggaagcgcttttacctgaagtggtatgaggataaccatccttcggcaatggcgttatgcccgcaaaccactgcgctgttacgcagcctgccttcggtgaaggccgcgatgtttgccgaattaccccatggcagccgtttgccacgccaccgcgacccttatgccggttcgctgcgctatcatcttggcttgatcacgccgaatgatgaccgctgctttatcgaagtggatggcgaacgttacagctggcgtgacggcgaaggggtgatgttcgatgaaacctatctgcactatgccgaaaatcagagcggggaaaaccgtttgatcctgttttgcgacatcgaacggccaatgcgttaccgttgggcgcaggcggtgaatcactggttggggcgtaatttgatgagtgctgcgacagcaccgaatgaagagggcgatcgtaccggcggcgtcaatcggctgttcaaatatatctatgccgtgcgtaaggttggcaagcgattaaaagcctggaacaagacgggctattacattatcaaatggctgctgtttggcgggatcgccgcactgattttcttcgcattttaaatagaacggggcgcaaataatgcgccccgctgatgttttgcaaccgcttggtatcaggcaaatatcgtcatcatataagcggcaaacagcgccaggtgcgcggtgccgttcaacacgttggttctgccggtagagaacgagatatggcacaatatcaacaccgtcagcattacgaccatatgcggtggctgcaggccgaagattagcgtctggccagtcagggtggcaataatcgttaccgctggcaccgtcagtgaaatggtcgccagcaccgagccgaagaacaggttcatggcgcgctgcacctgattgttcaacaccgcgcgcaaagcgcccaacccttccggggacaggatcagcaatgcaaccaggaaaccggtgaactgggttggtgcgttcagcttggtgagcaagccctcaagcgggttggcgttgaatttggttacggcaattaccgcgaccagatgcacgatcaaccaggcggcatgccacaggctgctgtgggacgagggtttaccgtggtgcgggtcgccatcgtcatcttcatgttcatatacaaacaggctctggtgggttttggtttggatcagcaggaacacgccgtacattgccgctgagatggctgcaaccagcagtgactggcccacgctgaagttgcccccaggcaaggcgcttggcaacaccagtacgatgaccgccagtgggaggatcgccatcaggtactgtttgataccgcccaggttaacgtactgggtagcaaacttgcgcccgccaagcagcagggcaaccccaaccagtccggcagtcacaatcatgatgattgaatacagtgtgtcacgcatcagggccggggccgcgtcgccggttgccatcagtgccgaaatcaggctcacttccaggattacgactgaaaggctgaggatcagcgagccgtagggttcacccaagcggtgggccagtacgtcggcatggcgtaccacgctgaaagcactgctgaggataccgaccagggcaataatgttgatggctacgatcagtgggaaactactggtaccgctccacaagttgagcacaaccagcgcggcgatagggaaaatcagggaatactctgtgtggcgagatttggatcggccaggatcgttgtgcgacttcattacggtacatctccttctcaaactgcgtggcccgtcatcgctgttcacctgcagttagggtcagcgtatccagaaagttgttaataataataggatacactctgcgcatgacgccgagtaataatgtgatgttgtgtttagtttttagaaagcaaaactttgctttatgcgataagagtaacaaaaaaaccgcatttgatgcggttttttttacttacttttacgttaaacaccagacattacttgttaaacgcctataaatggggcttaaccggcattttcaacggaaaataaggcagataatggcgatcaggagtcaatgttatccatgatatcgtgccttttctggtggtaaccctcctcatttaacccttcacgccagtaaggcaccgcataaagctgattacgctcacattggcgctcccgacgcaggtaacgacgcagttcgaccaccaggcgatcctcacctgccagccagaactgggtgccgctttgtggcagcggcaaggcgcagaattgcgtgatgagatcggccgttttctccgtgccaccaatgatccagcttagctcaacaccggcaggtttttgcagatcaataacgtccgcaggggtatcgacacggataaaagcgtggccttcgctacgtgcaggcaggttttccagtagtgcggcgatggccggtaacgatgaaggatcgcctgccaggcagtaaaaatcggcttctggcaacattggcttggggccgccagggttgctgataccaattttatcccccggcttggcctgacgtgcaaagttcaccgctggcccgctgtggtcgtgcagggcaaactcaatatcaatctcaccctgttgcgggcgaacggctcgaatagagtaggtgcgaatgagtggacgcccggcatcggcggcccacaccgggcccttttcggtgagcgtgggcaggtctggctgcgtttggcctgcgagcggtaagaacaccttgatatgtgcggcggcggcttcagcagggtaaaaacgcaggtctggcgcgcggaaggtgatacggcgcaggtgcggcgtgatgtcgcgtaaacgggcaacttcgatcaaatagggggcgcggctgcgtggggtttcggttgtcacaggactctcctttatcattctgcggctagtatatcacgccatttgataatgagaattgtttgctggttggtatggcgcatcaggccaagcggcgtgatccgcccggattgtatttttttgcggttaaaacgctgagatctgttaacaaaacgcaggggaagagtaaagttttacgtctataattattattgcttctgggtacaaatactttttcacattaaatatgcctggaaacttgattgaaaggtcagaaaagaatatggtcatttatacctgtcgtctttcaagttgcagcgttgttatctgcacttacccaccccagtcacttacccaaaagtaagctcctggggatgagtaagcttgttgcctagctgcaacttgaaatccatagggtatatattttttgctgggcggtggaaataaacccgccccgaatcccaaaaaagaaattgcatacacagtggcgaaggggttagggcaatcctattcccaggaggttgtattaggtgttaactcgagattttctgcaaaaagcagactgcaaaacggcattcggcacgatcgaagagtcgctgttgctgacaccggaacagcgctcggcctcactgacatgtacgctctccagacggccggataatagcccggtatgggttttcggctatggttcactgatgtggaacccggtatttgaatctgaagaggtgcgcccggcgacgctgcaaggctggcatcgggcattttgcctgcgtttgaccgccgggcgtggcacgctgcatcagccagggcgcatgcttgctctgcaggaaggggggcaaaccaccggtctggctttccgcctgccggaagataagttgcgtgaagagctggaactactgtggaagcgtgagatgatcaccggttgttatctgccaacctggtgtgagctgacgctggacgacggcagcgtcgtcaccgccttggtgtttgtgatgaacccgcagcatccgctatttgaagcggataccagccatcaggtgatcgctccgctgatcgccagcgccagcggcccgttgggcaccaatgcgcagtatctgtttgccttggacaacgagttgaaaaatcacggcatgaaggatgactgcatcggcgatctggtcggctatgtccgtcagtggctgcaacaaaacacctcagggccaataggtggcgaagccacggcctaaccctcagttaccgtcggggcgtcgtattgcgcgccccaaagacttgaacaaccctcgtgttgatatatcttatccctctaggtaataactttttgctgcataagttatttaaccataatgacaaggtggttatttatcttgttaattttaaagctatttataattttaagaaaaacataagtgaatttttaatgataaaaaatgcacttagcattaaaagctataagtaaagattattccttatttgttctgtccgcgcagactccgtatcaatattgttaacaattttggggagagaagggggggcggaatgaattttcagcaattaaaaatcattcgtgagtcagcacgttgcaactacaacctgactgacgtcgcgaatgcgttatttacctcacaatctggggttagccgtcatattcgcgagctggaagaagagctggggattgagatatttatccgccgtggcaaacggttattaggcatgaccgaaccgggcaaagagctgttggtggtcgcggagcgtatcctcaatgatgccaataatatccgccgtctggccgatgtgttcagcagtaaagacgcaggccaactccatattgccactacacatacccaggcccgctacagcctaccgggggtgattaaggagtttcgggcgctgtatccgcaggtgcgcatggtgcttaatcaggggagcccggaggagattgccgccatgctggcctgcggcgaagcggatatcggtatcgccagtgaacgcctgatgagcgaagagtcattggctgcttttccctattaccgctggaaccatgcgatcctggttccggaaggccacgagttgacacgccagccgctggtcacgttggaaatgctcagtacgttaccgttgattacctaccggcaggggatcaccgggcgctcacggctggatgcggcattcaaagctgcggggctgacgccggatatcgcgttaagtgcccaggattctgacgtcatcaaaacctatgttgagttggggctgggtgtgggcattctggcggatatgtcgtttgaaaaagagcgcgatcgagggctggtgagcctcaatgccgaacatttgtttgagcctaataccgtctggttgggcctgaaacgcggtcagttacaacgtaactatacctggcagtttatccagctatgtaatcccaccttatcgctcacggaaattaaagagaaagtgttctccgatcagttggaacagattatcgactatcagatctgaggcggtaatgcgctggaatggtgcaagcgcgccatatcactgtgcaatagtgaggggtggattacagattacacggcaataaccttctaaaatctgtagcttggcaaactggcatgccaactgcttactttaaaacgcggaaacgttgaatatccgcgatgaatttcaacaggcgtccgtgcagcacgtttgccccaatggtggaatgtgctgttcggacgtcttttttatcgcgggtaataccccctggttgaaatcctcgattacagctttttccgatggcttctttttgccgatcgcttaccctatggcctcaggttgcattatgctgtgcgacagtttttttctaccggccggaacggtagcgtcaacgaggtgggtttgccatgcggcaaggaaggcgaagggcaaacgtggttatgaccaaggttattcagcaaaaggtgtcacagttgttatccagcacgcgcttactcgggttatttgctctaccggtgataatgtttaacgcccaggcggaagctcccccggcagtggctggcgtccctgacgctcaggcagaggcacccgttgcagcgaaaagccttgctgaagccacggcggaagctccctcggttgggacgagcgtgattgacgatctggctaaagcgccaccgacagcaacagtagaaacccagacggtagtaccaccggcggcggtagcagaagctcaggaagtagtacctgcagcagaagcccaggcagtagcaccaccacccgcagaggcccagaccattgctccaccggcggtggcaaatgcggcagacatccctgcgcaagtgcctgcggccgtaactccggtagaaaagccagcggcagtggtcagtgaggtcaagacgcaggcatctccggcgcaagatctaccggagctgggcagcgctggcgtcaacgatgccgaaaaagaaaaagagtgggcaacgcgggcgaaaaagctggctgagcagaatcttaaccagatatccagcgagcgggcacgtgccgatgcaaaagactacctgaccaaccaagccacctcgaccctacagcaagagagcgaagagctgctttcaccacttggcaccgctaaactgtcgctcgcggtcacacctgaaggggattttaccggcagcagcggtcagttgttcagcccgctctatgacgttgaaggtttgttgacctacagccaggtgggttatctgcaaaaggccaacggttcacagggtaattttggcctggggcagcgctggatggtgggggattggctgctgggctacaactccgtgctcgacactgatttccagaatcagcgcaaccgtggcagcatcggtgccgaagcctggggggactatctacgcttgtcggccaactattaccacccgctgtcgtcatattctccacaggcaaataatgccgtctttctcggccgtccggcgcgtggctacgacattaccacgcaaggttatctgccgttttaccaccagcttggggcctcactcagctttgaacagtatcgtggcgacagcgtcgatctgctaggcaatggcaacaaacaaaccgatcctagcgctatgcaggtggggctcaactatacgccggtcccgttggtcacggtcaaagccttgcacaaactggataatgtgggcgacacccaggacaaggtcgagctggccatgacctaccgccttggcgtaccgctgatcaaacagatttctccgtattacgtggaacaggcaaaatcattgcgcggtagccgctatgacagcattgagcgtaataatgtgccggtgctggagttccgcgaaagcaaaacgttgcaggtgtttctggcgacgccgtcatggagcctgaatccaggggaaaccctgccgctggtgctggaaatcaaagcggccaataagatcaccgcggtcaactggcaaggggatactcaggctgtcagcttgacgccgccggcgaatatcaacgatccacaggggtggaccttgacggtgcccgcgtgggatgagacgccaggggccagcaatcactaccaactgtccgtcacccttgaggatgaaaagcagcagaaagccacctcgaactggatcacgctacaggttaccgctcccctgagcttgtctattgaaggggagcctgggttaccgccgccgcaaaccctgcagccaccggcaatcccggcggttaccgggccgttgcacccacagggtaactaatctttcttattgcccaacacccaaacggcggcttctacgcgggatttcagtttcatcttcttcagcaggtgtttcacgtgcaccttgacggtactctcggtgatggtcagtttacgggcgatcagcttgtttggcagcccctgcgcgatcagcttgaggatatcccgctcgcgcggggttaactgctggatgtcgcgttctaccgccgggcggttttcccgcaggctggccgccagcactggcgtcaatgcttcgctcagtaccatttgccctgccgccgcctgatgcagcgccttgagcagttcctctggttccatatctttcaagagatagccatcggcaccgcgttttagtgcgctaaccacatcgtcttcatggttggagacgctgaacaccaccactcggccggaaagggcgatttggcgcaggcgatccagcgttgccaggccgttcattccgggcatgttcagatccaacaggatcaggtcgggatcgtgcagctcagccagctccaccccttgttcgccattgctggcttcggcgatgacttgtagccgcggatccatgctaatcaactgcttgacgccgttacgcaacatggggtgatcgtcaatcagcagtatggtggcagcttcttcggtcgtcataatatttccttattcgatagcagagttatccggacggaacgtcacccgtacttcggtgccgccgccgctgcatggcaagatttcgcactggccgtgcaggcttttggcgcgatcgcgcatgatgatcaggccgtagtgatcgggccgttcgctgatatctggcaggccgcggccattgtcgctgacgcttagggtgacttcccccttaaggtttatcacccgaatcgtgacctggctggcctgcgcgtgttggtgaatgttactcaatgcctcacgcgcgatctgcagcaggtggatcgcctgataggccggtacgctacgtgggcctaactgataatcgagttcgatggtgatccccagccgctgattgaattcttgcaccgtagactgtagtgccgccagcaggccaggttcggtcaatcgcaggcggaaggtggttaacagctcgcgtaactggcgataggcggcactgatctcttcacgcatctgttgcaccagcgccaggctggccggagggagttcgcccccctgcatttgcaggcaactggtctgcattttcaggcaggtgagggattgagcgatggagtcgtgtaactcgcgggcaatcgcggcccgctcctccatcaacatcaactgctgctggtggtcaacctggcgttctatcgccaatacgctggtcaactgctccatcagggtattcatcaactgacattgctcatcgcttagccgttgttctggatcatgttgagcgacgacgatgccataattgcccagttggtcactcaggctccagctaagagaaggatggccctgactatgcggctgatgttcgcttaagcaggcgctacagaccggattatggcaatactccggcctcaacggctggttaccgcttaattgcagaaactgttcctggctgttgttttcatacagccgtacctggatgctgtgtagcggcgtcagcgtttgcaactggttgaggatcggcgtcaggcggctacagatcggctcgctggggtgtaactggcggctggggcgatacagaaagcccagcacctgatttttctgttgcaggtcggcggtcttttctgcgacacgttgctccagcctggcatagatggtggcaagctcgtcggacatggtgttaagcgcagcgccgagggaagacatctcgtcctgatgcccacgttgggcaaagcggtggctgaaatcaccgcggccaaccgccagtgccaatgccaccaattgacgccaagggtgcagcaaacggcggcgtagataacagatggtgccgaccagcagcaacagcgtcagggcgataaatcccccctgaaccagcgtcaccatcaacaagcgccgttcggtttgatgatcgatatcggaaaccagcttgtccaacaggctgacaaaatgggccacttggggggccgcatcggcggggcgttgtgcttggcgcagccgtggttgcagctggtttagccaatagtcacgcagcgtcagcaactgtggggttaacccttcgcgctccagcgcctgctgcaagtcgcggctggtttcatcctgatccaatccctgcatcaggaggtcactgtgggcatccagagggacctgggagagcagacggtagctctgcatccgaagggagcctgctttgttgatggcatgggcattgccctgaatgctttgtgacatccaggcggaaatactcattccggcgatacccagcactcccaacagtagcattaacagggcaacctggttaacgatggaaagcggagccagcaagcgtttcatcgaatacgcatctcccatagagcagcagaaaccagagaggagatacctgcaactccggccgccaaattacgtcaatagcagccatttttcctcatcccccggcgtaaccccatacccctaacgaagtaccccttagtttcctgcagcctgagccattgccaaacctttctcactactgtggtataacctgctgaataccaatagattagctagccttgattggctactcactaagggatgcatgaggtttttccgccatgagctacctgcttgctcattgatttgcgtcaactttaccgcttgaggggatcaactagggtgtgcgcagttatcaccgtgtttctgaggttattatgtcgcaatctgcaacgcctttagcaaaaaaaacgggtgcggttattcaggactggcaacctgagaacagcgaattctggcagcagagtgggcaccgcattgcccgccgcaacctgtggatctccataccctgcctgttgctcgccttctgcgtatggatgctgttcagcgccgtggcggttaatctgaacaaggtgggttttaacttcaccaccgatcagctgtttctgttgaccgcattgccttcggtttccggtgcgatcctgcgcgtgccgtattccttcgtgatcccgatgtttggtggccgccgttggacagccatcagcacctgtttcctgctggtgccttgcctgtggctgggctatgcggtgcaggatccgaccacttcattcaacgtatttatcattattgcgctgttgtgtgggtttgctggggccaactttgcctccagcatggcgaacatcagcttcttcttcccgaaggctaagcagggtggcgcgttggggctgaatggcggtctgggaaatctgggtgtcagcgtgatgcaactggtggctccgttagccatctcgctcgccatgtttggcttcctgggtggcactgggcagacacagccagacggcagccagttgtggttggaaaacgccgcctggatttgggtgcctttcctgctggtggcaacgctggcggcctggttcggtatgaacgatttggccgcctcaaaggcttctttgcgccaacagttgccggtactcaaacggggtcatctgtgggttttgagcctgctgtatctggcaacttttggttccttcattggtttctctgccggttttgccatgctggcgaaaacccagtttccggacgtggtgatcctgcattatgccttcttcgggccgttccttggggcgctggctcgtcccgtgggtggggcgctttccgatcgctttggcggtattcgtgtgacgctgctgaactttatcgtcatggctattttcgctgccttgctgttcatgaccttgccgggtagcgatcatcagggttcatttatggccttctatggcgtgtttatggtgctgttcctcaccgccgggttgggcagcggctcgaccttccagatgatcgccgtgatattccgtaaaatcaccgtggacagagtgaaagccgaaggaggaagcgatgagttggcacagcgcgaggcagtaaccgattcggctgcggctttgggctttatctcggcgattggtgcggcaggggggttctttattcccaaggcgtttggtacttcgctggcgttgactggctcaccggctggggcgatgaagatcttcctggtgttttatattctgtgtgtcgtggtgacctggggcgtttacggccgtaaaaaggtttcacgctagtttggttaagcggaggcaggctgcgcaccccttcggtcgaacttgtgcgacgcttacccattcagcaacattgcctgtcagtaatctgacactccccgcttgccggggagtgttttgcttctcaattcctacacgttgtttcactgatagccaatcggtgaattcatcgctatcttgccagaaccagactgtgcaatattaccgacaattggcatttcttgggtatatattaatatagcctttattttgttgagtaatgataagatgattccatttttatctattgtgaaatcttaatgtccacggtgtcatcagaaaagaaaacccctaatccttggtgcgaggtattaatgtctgaattgcccatggaccaggagagaagtgagtttttctcgttgagttgcatgatttcactaagttgtgaaaaacaggtgaaatataaattaagtctatttcactgagtttatatttaaattcttgaacattttttcatatttctatacaaatgagaacgctatggactcataagggaaatgaaaagtggatgctgaacaggaaataaaaatcataaattttgatgttttgctcccttccaggcagcgttcacgcctacgttggaaagagcttcagatcctttccctgctggttaaccggtcgcctgagttggtgagccgctcagaaatcattgagactatctggaaaggcacctattgctcagactcgacaataaatcagacgattaagtccattcgccagaaaattggcgacacggaacatgctctcatcaggaccattcctcgtcttggttataaggtggaagataaaacgatttttaactttatatcgacaggggaatctgccgtcgctacggagattattcctgggaatgatgatgctgaaactttcaatagtgatctatctgagggtaaattaaatcatatggccgatgaaattattgaaaatgcaacggtgtcggaaggttattccctcatgagtccgatattaagcgaaacggctttggctgattccaggcgaaacacgctaacgccgtggggaagaatattgaagtatctggcggcgtttattgcactgttgacggtttcacttttatcctatgcattgggcagccgaaccaggcctgcaatacagtatgagcagcccaacagccctcgtatggtcctttctttttcattagaaacttcccctggtgttaatccccaggcgctgaactgcgtatatctggcggggaatgaaaaggaaatgcgggttgaatgccgcactcgttagcagggatcccccttcaagctgtttaagatagaagtattaaactgcgcaagattatcccgattaagctcgctcacacattcgttttaccagcactacccccaaatttccgtttcaggaggttcgccaggcgcttatccctgtaaatctattattcttgttttattacagttagatagcgttatttttaacgatcatcctttagtggtatttccacctttccccacgttttccctcactgattcccttgatcgcaatcaagttacgcccggcagagcatcagtagccttggccgcagattgagcaatgtcacttggcaacttcttacaacaacatacccgtcgtctttcaagctgcagcttgaaattcgagtgtaacgagccttcaggagaactccggatgagcaaatttctagatcggttccgctacttcaagcagttggccgaacctttctctggcggccatggccaaacgctaaacaccaaccgcgattgggaagacggttaccgcagccgctggcagcacgacaaagtggtgcgctccacccatggtgttaactgcaccggctcctgtagctggaaaatttatgtgaaaaacggcctggtcacctgggaaacccagcagaccgattacccacgcacccgtccagatttgcccaaccatgagccccgtggctgcccacgcggtgccagctattcctggtatctctacagcgccaaccgcctgaaatatccgctgatgcgcaaacgcctaatcaaactatggcgcgaggctaaagccttgcatagcgatccggttgatgcatggggttcgatcgtttccgatccggaaaaagccaaaagctacaaagtggctcgtggccgcggtggttttgtccgctccagctggcagganggggtttgtccgctccagctggcaggaagtcaatgaattgatcgctgcctctaacgtctataccgccaagacctttggcccggatcgtattatcggcttctcgccgatcccggcgatgtcgatggtgtcttacgcggcgggggctcgttacctatcgctgattggtggcacctgcttgagcttctacgactggtactgcgatttgccaccggcctcgccgatgacctggggcgagcagaccgacgtgccggaatccgccgactggtacaactcctcgtatatcattgcctggggctccaacgtgccgcaaacgcgcaccccggatgcccacttcttcaccgaggttcgctacaagggcaccaaaaccgtcgcagtgacgccagattacgcggaagtggccaagctatgcgaccagtggcttaacccgaaacagggtaccgatagcgccatggcgctggcgatgggccacgtgatgctcaaagagttccatctggatcgtgaagttggttatttccgcgactatgtccgtcgctataccgatatgccgatgctggtgttgctggagccgcgtaccgaaggttattacgccgctggccgcctgctgcgcgccgccgatctggtggatggccttggccaggaaaacaaccccgagtggaaaaccgtcgcgctggatcagaccagcggtgaactggtagcgccgcagggctctatcggtttccgttggggtgagaagggcaaatggaacctggaacagcgtgaaggtaaagcccagcaggatgtggagctgcaactcagcctgctaggcagccatgatgaggtggttgacgttggcttcccatactttggcggtgccgagagtgagcatttcaacagcgtggcgttggacgacatcctgctgcacaaactgccggtaaaacgcctgcaactggcggacggcagccaggcattggtgaccagcgtctacgatctgacgctggctaactacggcctggatcgtggcctgaatgatgccaactgcgccaacggttatgatgaagtcaaagcctatacgccagcctgggcagaacagatcaccggcgtctcacgccataacatcatccgcattgcgcgggagtttgccgaaaacgccgagaaaacccacggccgctcgatgattatcgttggtgccggtgtcaaccactggtatcacatggacatgacctatcgcgggctgatcaacatgttgatcttctgcggttgcgttggccaaagcggcggcggctgggcgcactatgtcggtcaggaaaagctgcgcccacaaaccggttggatgccgctggcctttggcctggattggcaacggccggctcgccatatgaacagcacctcgttcttctacaaccactccagccaatggcgttacgaaacggtcggcaccgaagagctgttgtcaccgatggcggacaagagtcagtttgctggcagcctgatcgatcttaacgtgcgtgctgaacgcatggggtggctgccatcggcaccgcaactggacactaacccgctgcatctggccgctcaggccaaagcggccggtcagacgccgctggatttcaccgtggagagcctgaaacagggcagcgttcgctttgctgccgaacagccggataacccgcagaacttcccgcgtaacctgttcgtctggcgctccaacctgctgggctcctccggcaaggggcatgaatacatgctcaaatacctgctggggaccgagaatggcatccagggccaggatttgggccagcagggcggcgtaaaaccacaggaagtcgagtggttggataacggcggcgaaggcaagttggatctggtcgtgacgcttgatttccgcatgtccagcacctgcctgtattccgacatcgtgctgcctaccgccacctggtacgagaaagacgatatgaatacctcggacatgcatccgtttattcatccgttgtctgcggctgtcgatcctgcctgggattccaagagcgactgggagatctacaagggtatcgccaaagcgttctccgaggtgtgcgttggccatctgggccaggaaaccgacattgttacgctgccgatccagcatgactccgccgccgaactggcacagccctacggcgtgaaagactggaagaaaggcgagtgcgagctgatcccgggtaaaaccgcgccacacatcatggtggtcgaacgcgattatcccgcgacctacgagcgctttacctcgctcggtccgctgctggacaagcttggcaatggggggaaaggcatcagttggaacacccagaccgaagtcgacttcctgaaaaagctcaactacgtgaagaccgaaggcccggcagttgggcggcctaagatcgaaagtgctatcgatgcggcggaagtgatcctctcgctggcaccggaaaccaatgggcaggtggcggtgaaagcctggcaggcgctgagcaacatcaccgggcgcgatcacacccatctggcgctgaacaaggaagacgaaaagatccgtttccgcgatattcaggcccagccgcgcaagatcatctccagcccgacctggtctggtctggaggatgaacacgtctcttacaacgcatgctacaccaacgtgcatgagctgatcccatggcgcaccctgagtggccgccagcagctttatcaggatcacgagtggatgcgtgccttcggggaaagcctgctggtctatcgcccgccgatcgacacccgtgccgcgcagccgttgctgaataaaaagccaaacggtaacaaagagaaggcgctgaacttcctgacgccgcaccagaagtggggcattcactccacctacagcgacaacctgctgatgctgaccctgtcacgcggcgggccaatcgtctggctgagtgaggacgatgccaaagatctgggcattgaagataacgactggatcgaggccttcaacgccaacggagcgcttaccgcccgtgcggtggtcagccagcgtattccgtcggggatgaccatgatgtatcacgcgcaggaacgtatcgtgaacattccaggctcggaaatcaccagccagcgcggcgggatccacaactcggtgacccgcgtgtgccctaaaccgacccatatgatcggcggctatgcgcagctggcctacggttttaactactacggcaccgtaggctcgaatcgcgatgagtttgtggtggtgcgcaaaatggaccatatcgactggttagacggcgaaggtaacgactacgcgcagggcagccagcaggagaaagccaaatgaaaattcgttcgcaagttggcatggtactcaacctggacaagtgcatcggttgccatacctgttcggtgacctgtaagaacgtctggaccagccgcgaaggcatggaatatgcctggttcaacaatgtggaaagcaagccgggcatcggctatcccaacgcctgggaggatcaggacaaatggaagggcggctggatacgcaaaatcaacggcaagctggagccgcgcatgggtaaccgcattggcctgctgtcgaagatctttgccaacccggatgttcccgcgctggacgattattacgagccgttcgattacgactaccagaacctgcataccgccccgcagggcaagcatcagccgatcgcccgtccgcgctcgctgatcaccggccagcggatgaacaagatcgaaagcggcccaaactgggaagagatcctcggcggtgagttcgacaagcgtgccaaagacaaaaacttcgacaacatgcagaaggcgatgtacggccagttcgaaaacaccttcatgatgtatctgccacgcctgtgcgagcactgcctgaacccggcctgtgtggcgacttgtccgagcggtgcgatctataaacgcggcgaagacggcattgtgctgatcgatcaggataaatgccgtggctggcggatgtgcctgaccggctgcccgtacaagaaaatctacttcaactggaagagtggcaaatccgagaagtgcatcttctgctacccaaggattgaggctggccagccgaccgtttgttcggaaacctgcgtggggcgtatccgctatctcggcgtgctgctgtacgatgccgaccgcattgaacaagcggccgcgacagagaacgataaagacctgtatcagagccaaatggatatcttcctcgatccgcacgacccggcggtgattgagcaagcgttgaaagacggtatcccgcaaggggtgattgagactgcgcagcagtcgccggtttacaagatggcgatggactggaagctggcgctgccgctgcacccggaatatcgcactttgccgatggtgtggtatgtaccgccgttgtctccgatccagtcggctgcggatgccggtgagttggcccacagcggcgtattgcctgatgtcgaaagcctgcgcatcccggtgcaatatctggcgaatctgttgaccgccggggataccgctccggtgctgttggcgctaaaacggatgttggcgatgcgccactacaagcgggcagaaaccgtggacggcgtggtggacaccagtgcgcttgagcaggtggggctgacagaagcgcaggcgcaagagatgtatcgctatctggcgatcgctaactacgaagaccgtttcgtcgtgccttccagccaccgtgaactggcgcgcgaagccttcccggaaagcaaaggctgtggcttcagctttggcgacggttgccacggcagcgacagcaaattcaacctgtttaacagccgccgcatcgatgccatcgacgtgacgcagaaaaccccgcgcaaggaggatgcctcatgatcgctctgcgaattattgcccgcctgctggattatcctgagcaggaattgtttgaccatcagcaagagctggtggaagccctggaaccggcctgcgaactggacttgcatcacagcgcccagttgattctgtttatccgccgcttctgtgcccgtccgttgctggatgtgcaggcggagtattgcgagctattcgatcgcggccgggcgacttcattgttgttgtttgagcatgttcacggtgaatcccgcgatcgcggccaggcgatggtcgatctgatggcgcaataccgcgaagccgggctggagatcgacagccgcgaactgccggacttcttgccgctgtatctggagtatctggccagccgcaacaaagaggaagctcaaggcggattgcaggatatcgcccccatcctggccctgctgggtgctcgtttgcagcagcgtcaaagcccgtatgcggtactgttcgatctgctgctggtgttgtctgctagtggcgttgcagccaaaagtttgcagccacaagttgccggtgaaacacgtgacgacacgccacaggcactggatgccgtctgggaagaagaacagatcaagtttttgggtgagcaaggctgtgcttcggcgcagcaagctactcaccagcggcgctttgctggggcggtagcaccacagtatctggatgtgggctcgatgaccacagcaaccaaaggacgctaatcatgcactttctgacgcttttcttcttcgatatctatccgtatatcgccggagcgatcttcctgatcggcagttggctgcgttacgactacgggcaatacacctggcgtgctggctccagccagatgctggataaaaagggcatgcggctggcctctaacctgttccatatcggcattctgggcatttttgccgggcacttcctcggtatgctgacgccgcactggatgtatgaatctttcctgccgatcgccgtgaaacagaaaatggcgatgtttgccggtggggcctgtggcgtgatgatgttggtgggcggtgtgctgttattaaagcgccgtttgaccaacccacgtatccgcgccaccagtagcgtgggggatatcctgatcctgacgttgctggtcgtgcaggtgtgtctggggctgttgaccattccgttctctgctcaacacatggacggtagcgagatgctgaagttggtcgcctgggcgcaagcggtggtgaccttccatggcggtgcagctcaacatttggaaggggttgcactgatattcaagatccatatcgtgctcggcatgaccctgttcctgatattcccgttctgccgtctggtgcatatctggagcgtgccggtggaatatctgactcgccgctaccagttggtacgtaaccgccgttaattccccacgttatccagcggcaaggtctttggacgttgccgctattttatttccctcgtattgctgcttaaccaacacccttttatcgttgactcagtctttgattttggcctgccttagcctccccgaaccaggtcaaacagcttattcttatagatctcttttcggcgttgatctaggctgtgccattaggttaacggcatggtttaccaggttagttaagcgaacggaatcaatcagtaaaatttcctgttaggattttcattatgctgatgttaaataagggctagatcaaaagagcgtaaatggtttgattaattacgctggatgctaagccaaacgagttagggataagcagactgaacacctatgaccattgataacctgtcccaccccgtcctgccgctgaaaatcatcgcgaccggtgcggcgttgcctcccggctgcatcgaatcttcggcgttggatcggcaattgaacaaacccgtcggctatgtagaaaaacgctcggggattattcatcgctttcatgccagcaatcaggccagccaggccgaactggccgtcgccgcattggatgatgcgctggctcgccatgctatcccgcgtgactccatcgatctgttgatctcggcctcggctatttccgtacaggcattaccctttagtgccgcgcatattcttaaaatcgctggcttaccctcaggtaccgcaggttttgatatcaataccagctgcgtcagctttattagcgcattgcaggtggcggctgggcttctcaacacaggcgtttaccggcgaattgccattgtctccgccgatatcgcctcgcgcggtatcgactgggaagatgaagagtcctcactgatttttggcgatggtgccgcctgtgccattgtggaacgcggcgatgggcgcagcggaattttgtcctacctgatggaaacctatccggaaggcagcgatctgtgtgaaatccgcgccggtggcacacgccgtaacccgcgcgccgggatgaacgacagcgattttctgttccatatgaagggcaagcagctgttccgccaggcttctgcgctgatagaaggctaccttgagcgcttgctgagcgccgcagggctcaccttgccacaaattgccaccgtggtcccgcaccaggccagccatctctcgctggagcatatgcgcaaaaggctgaatgtagcgccagaggcgttggtggatatctatcgttaccggggcaaccaggtggcggcgtcaattccttccgcgctgcacgaggcggcgatcaccgacaggctgaaggccaatcagccggtaatgttgatcggtaccgctgccgggctgaccctgggcggcatggttctgctgccatgaaagtcttggtaaccggggcgaccagtgggttagggcgcaatgcggccgagtggttgttggctgccgggcatcaggtgcatgctaccgggcgtgatgaggccgttggcagtgagttggtggcactgggggcaaagtttaccccgttggatctgacccgcgccgggatggaacagtgcgaacagctgatgaggggttatgacatcgtctggcattgtgccgctaaatcttccccatggggcgatcgcaaggcgtttttccaggccaacacctacgtcacggaaaagctcgccaaagccgccgggcgctgtggggtgaaacgctttatccatatctcgacgccggcgatctattttgatttcaggcatcatcacaacattaccgaaggtgaaccggcccggcggtttgccaatcattatgctgccagcaagtatgctgccgaacagagcattaacgcgctgctgcatcgctatccgcaaaccacctacctgatcctgcgcccgcgaggcctgtttggcccgcatgaccgagtgatcgtacccaggatcctggcccagatgcagcgtgataaaggtgctctgcgtctgcccggtggcggtaaagcctatctggatctgacctttgtgctcaacgtagtgcatgcgatggatctggccagcaaccgggcgaacttgccttccggcggcatttataacatcaccaaccaacagccgcagcggctggacgatatgctgcaccaactgctggcccaacagctaggctggcaatatagggtgcaggcattgccttaccggctgttgtgggcggtggcaggggggatggaattgatagcccatttcaccggcaaagagccgatgctgacgcgctacagcgcggcggccgcctattttgatatgacgctggataacagccgcgcgattgaagaactgggctaccggccacgttatagcctggagcaggggatagagctgaccgggcaatggatgaaacagcaggggatggcggcgcatggctaatatcaccaccttcgaaatcggctattgcacccaccttggctgcatggcgctgcgtggctcgccgatgcgtagctgcaaattcccctcccgtgcctacctgttggaggtgggcgagcgtcgctggctatgggataccggttatgccagctatttccaacagtacaccgccagcggtattttccggttgtatagccagattaccccggtctatttcagcccacagcaggcgctgtttgagcagttgcgtagccggggtgtaggcgtgggtgatattgaggcggtaattatttcccattttcatgctgaccatatcgctggcctgcgtgatttcagccgtctcaacatgatttgttctggtgagggctggcagcaaactcgtgagctgcgcggctttgccgccctgaagcgggcgtttataccggggttgatccccgaggagtttgaatccgcattgcagtttgtggagtcattcccgctacagagtctgccagccgaactggcaccgttccagcaggggtatgcactaccaggcagcgaagggcaaatcctcattgtgcctctgccgggccatgctgcgggccatcttggtgcctttgtccaaaccgatgcgggctggacgctgctggcaagcgatgccgcctggtcgccgctgaactaccagcaactgcgtggtccttcacggctggcgaacctgatcatggataatccgcgtagctactaccaaacccttgaagcgctcaaccaactgcatcacggcggcgcggcagagatcctgttgtgccatgagggggatttatgatcccgctgatgacgctgtggcactacctgcgagcgcgcaaactgcatttcaccgaacgggcagaactggaggcttaccaggcgcgtcagttaaaacgctttgcccgccgggtattggcgcatagcccctatttccggccatactgtctgttacccgtgagcgaatggccagaaatggacaaagcgatcatgatgacgcattttgatcggatgaataccgctgggctgcaactggaggcgctgttggcctgtgcccggcgcagcgaaaccgatcgcgacttcaccccaaaagtgggcaaatacagcgtaggtttatcgaccggcacctccgggcgacgcggcgtgtttgtggtcagcccgcaggaacagcaggtctgggctggcggcatgctggcaaaaatgttgccgcaaggggtgtttgccggtgagcgggtcgcgctgtttctacgtgcggataacaatctgtatcacagcgtcaacaaccgctggttgagcctgacgttttacgatctgtttgctccctttgccgagcacttaccgcagattgagcgggagcaacccaccatcgtggtcgcacctgcgcaggtattgtgcgcgttggctaatacggtcgagcggggtgaactgcaattgcgagtgaagaaagtgatctcagtggctgaggtgctggagccgcaggatcgccaattgctaaagcgggtatttgccgacgtaggcgaagtctatcaagccaccgaaggttttctggccgctacctgtagccacggcaccttgcatctgaacgaagagtttattcacgtggagccacagtggatcgatgagcagcactttaccccactgatcaccgattttacgcgccgtacgcagccgatcgtgcgttatcggctggatgatattctggtgcggcgtgcggagccttgcccatgcggccaggccagcatggcgttggatcggattgaagggcgctgtgacgatcaactcttgctgccaggattgcagggcacagcgcagcgagtctttgccgatctatgccgccgtgtgattgccaacgcgttgcccgccgtggcggattatcgcctaacccagttgtctagccagcggctgcatctgatggccgactgtagccctgccgagctggaacattgtcagcagcacctgatggcgttgtttacccagcaaggtatcgcggtgcagcaactggagtggcaactgaccgcacagagcatcatgccgaagttcgatgccaaacgccgtcgcatcgtgcgttttccggaggcatcatgaaagaggtgatctatcgcctatggcaaatgctgctgggctggggctttgttggcctgatttataacagcactgaccgatggcaaggagcgggttatcagctgacgccgagttggctggatcgcgcaattccctttagcccgcatgctatctggctatacctgtcttttttcctgatcgttccgctgtgctatctgctgtgcccgctgagccggatcaaatggcttagaagctcgatgcagcttgccgctattgttgcgggggccatctatctgctgtggccgacgacgatggactacccggtcgatcagggtggttcactcagctccaccatgctggcggcattgatcgggattgattcaaaacaaaactgtttaccctcgttgcatatagccttgacggccctggccgtgtgggccgtggcggacagtcggaaaaaatggcgcagcgtgctgttgtcgctttggggattggcgattgccttctctatcctgcaactgcgccgacacctgctggtggatttgctcagtggagcggtgttggccatggccgtcggctatgcctgccaacatgttcgatggattgtcagtgattttcgtcagggagaacgaccatgaccgatctggtaataccgatagtctttatgctgtgcgtggtgctgggcgaagccctgtggctgcaaaagcgcaatcgtggcagcgttgattggcacgatgtgatcttcaacctcaactccgggcatatcatgctgtggctgttccgggggctggagatcttctgctatggctatgtggcgacccattacagcctgggcctggtcgatagctggccggttgcgctggtgtggctgtttgccctgctggcgtgggactttggtttttactggttacaccgcctgcatcaccgtttccgcctgttgtgggcggtgcatgtggtgcatcaccagggcgagcatttcaacctttcgttgggcgtgcgtaactcgtggtattcgtcattaacgtcgatcccgttctttatgctgctggcgttggccggtgtgccgctttcggtgtttatcaccgtttcgatcctgcactacggcattcagttgtttaaccataacgcgctgaccccaaaactgggctggctggaaaaaatctttgttaccccggcgcaccatcgggtgcatcacgtcaacgatctggcctattccaaccgtaattttggcggcagctttatcttctgggacaagctgtttggcacctttggcccgtcgctgccaaccgagcctttcgcctatggcgtacgcggggagaaatcttcggttaatccgttctgggccagcaatcagccgtttttgcgctacttcaagctgccttacaaaccttcggccaatagcgcccgtttccgcagctccgcgtggtgtatggtgagtggtgcgttgctgctgttcgccctggtgctgggttatgtgtatcgctttggatatggctacaacggcctgaccggcgagcaggcggcactgtttatgctgttggcggtaggcgcggtagcgttgggggggattgccgaaggccgtagctggggcgtaaagacctggttactggtggcgttggccgctccactgttgttgctgttggcgctggggtggcaccaaccttactggtggctgatgacttgcggcattgcggtgcatggctgcgccgtcgccgctggctggggacgccagaaggaagcggcccatggctgactctctgccgccactctctttccctgtggatggggaacaggcgtttcatcgtgaactgaaacgtcgggcccatgcttatctgagcggccgtaacgatcaccgctttgccgatgtggcccgttgggtcaaggctatcgtcctgctgttgttgtgcgtggggttttacctgctcagcctgatgcagcagcaggggctggcgtttatgctgtgttactttgcctttgtcatgatgggcatgttgctgaacgttaacgtcaatcatgacgcttcgcataacgcgttcgcccgcactccttgggtgaatcgcctggcggggcgtttggtgacgatcccgctgggggtcgatccggactattggcggacacggcacgtcagctatcaccatgtgtatgccaatgtcgaacattacgatctggacaccgaagagaacggctttttccgccagacgccgttccagcaatggcgggcgcacatgcgctatcagc

SEQ ID NO: 324 - DNA, 40494 bp, unknown
  Altogen  635822 strain
  misc_feature (630)..(697): n is a, c, g, or t
  misc_feature (800)..(837): n is a, c, g, or t
  misc_feature (40339)..(40380): n is a, c, g, or t
cttatcgataccccaacaatcccgcacacaagggcttcacctataccggccctgatttttccacctccccacacaacgcgccggaacgccacgacaaacgcgacgaaaaaaccgttgatgcctgtcgagtagtggtaatagaaggtcgcaacggctgcgagccagcttggatccttttcaggcatcttcataacctccccctgccggggcttagcccgatcgccgggtggtagaaataaaaaaggccacgcataagcgcagccgttctgccaataaattggctgggtattactcagattgtgatcctgcttacacggtactggttcgctggaatatgtaaggccagtaccgcccatgcccttgggtctagattttggaatcgcccttgctatcctcagccgtaaccggtgcgtgattggctttcacgttgcaccaccgtgagttaccccatttgctgttacattttcttgacctccagaaacgcaaaaacccgcactattggcgggtttcttttgatttgtcgctgcggatataacttcgcgaagcatatacatatttaatctatttccgcgcaaagtcaacgcttatatctatcagcatcaaaattaaatgcatcactcattggcaggnnnnnnnnnnnnnnnnnnnnnnnnnnnnnnnnnnnnnnnnnnnnnnnnnnnnnnnnnnnnnnnnnnnncaggtcggcggccatggccttcttgcttttccccttgccggtatagcgttcctggatgacgtgcatcaggcctggatgagccagcagcgtcttgccgattacnnnnnnnnnnnnnnnnnnnnnnnnnnnnnnnnnnnnnncttcccctccagcaggtcgagcaggtacgcgtgcaattccccttcctccgcaccggctttcttcagctcctgcagtgccttggtgattgcggttttggtcaccccattgctggccaacagcatgttgaacatattcccggcgctaccgaacttggtcatgcccgaccaccggccccacattttcagcttaccctggataaacacacgttccagcgcacgcaagtgcagctctttgccgtcgccacggcctttgtactcgggataaatcatagttttccttcctttctcagaattgcttgcgtgcgaaatacgccctcggcatgccatagccgggctgtttctggttcaatattgtgggtacggccgtctatctcatcgtggcacgaactgcaggcccatgcgccttgcgcgtcatcgggctttatcccggtaccgcaggtaccagccaagcgataatgtgccagaaccgtagtttcatcattttggttgcagaccccagggatccgcacctgacattcacgcccgcgcgccgccttagttaatttgctcatgaggtaaactccatcagctgcgcggctgcgttctcggcttcctgctggctcttgaaggtgcggaaaaggatgtaattccagagaacgtcgaggacggctttgcatagctggccgaattcgatatcgtccatctttgcgaatgaaatactgcggggctctttgcgggtgctgccgtcgggcagttcgtaggcgtcgtaatgatcggcctcgatgattacccatgaccggaaggcttcgaaggacttggcggcgctaatgtttcctgcgcgcttgcgggctacatcatccaggtactcatctgcggccgcctgcagtgcatcttcactgccggagtaataggccaaaaacttgacgtaaccattcaccaacgctttatctgctggggatatagtgccgccggttggctgccaatagtgaaagccgagattgaggagagagaagaatcgacggtggaaaagcgggttccggctctgcttgaaatcagcatacaggaccgcgccaaacttcactttagtttgcaggaattccctggcatccggagtaaacggaaccagtagaccacctgctgattttacaaacgaatactgcgccatggtttccccttttggcgcagcgattgttcagaatggaagcggctgggtgttcagtccagcctcttaattatagcgtaataccttcgggagacacaactgtataacccgccaacttttgcatttcaatcaatgccttaaatgtcaaaataaactcatcgtctttgatgtctcttgtgccaacaaccttgttatctttgacgcgaatcgcgacgtagcagttggcagggagcgttgttataacatctgtcacatcaaccataagtaaccccggtaaatcagatagatataatccctccttagtccctgcctgccccgcactgagtgccaagccgtacgttatcagttgtgatgtgttagttggttttttatcgatcactttagccgatcatcgcccaaaaccactgtatataaaaacagtatcaccaacattgtgattgatcaattgttcactgagaaataatttttaatgcatatatctttatgattaaaaagtaaacttcatccctgaccctaatctgttttgctatcgaccacacataataatccgtcacgacttgcttatcagtatcagctgaaatgaccctatctctccccctaggtctgttctcagcttgctcgaaagagtaaaaggtgaaaattgtgcaaaaaatcacgttgtcacgctttgtttctacttaactcttgaaatcagcactatctcgaaagaactgaaaaaatttcgtgctataacataattaagcatttagagtttgcgaccatctgaaagcaaacacattgtaacgtacaaaaaacgaacatattagcatgagagatatcgacgtaagacgagctgtgcactcaaaaatccttaaggaacatcataaggatccgggcacactgataattgatgagttcactatgggtcttggcgctagccgggctgacataacagttatcaatgggttaatgcatgggtatgaattaaaaagcaaaagtgacaatttgctccgtcttccaatgcaaataggttactactcatccgtcatggataaagttacgttagtggtatctgaatgccactcggatgcagctatcgaaatggtacctgaatggtggggcgtaaaaattgcttgtgaaggagcgagaagcgcggttcacctgcacacagagagacataataagctcaaccctgctgtggataaaatttcgcttgccatgctcctttggaaagatgaaatgttatcaatcttgacaggccttgggttagaacgtggcttgaaaagcaagccacgtaaagtgttatgggaaaagttatcttcatctctagaaacagatcaactcagagactatgtgcgagctaaactcaaatcccgtataaattggagagctgaatcacaacctttgtaatgtgatgattttgcccaattctgcgccatacctcaggactcccaaatttgtaagtgccgttgggattttgcatatattgggagtaaacctgagcgtaaccggcaatttcctgatctccaacggaaaatgcaggcccagtatattcaggatgattcacaattgctaaagcatgagcgccatattgctcataaccgtaccgtcttgcaagacgtcccctgaaaacccaaaactcatcatcgccagtgtaacgaacgctggccgtagcgctcggaaatcttgtcgctagccgggcatactctggatgttgaaccccataatcactgtagactccctgcctagctaactcgccgctacgatggagaccctgccacaaaatccattcgaaacgggtttgagaatagacaccaacagaaatattactcagatccacagggaatgaaccagaagctaatattatcgttctgaaactattaatattgggaagattattgattaaccctaatgctagcatcctactatggccagagttcaacccatcctctgtaagcatatctcttaaatcaatcacaacatcaatgttttcatgacttatattcaacctttgaatgtatgctgtaattagttgtgggttaaccaaatctgttgtcgtcaacctcagacaaacttcgttctgcactagcgagtctattgctgatagataagtaggtgtcctagttggagagcttaccgggataactctaaatccagcggatctagcctggttaacagcgtttattattggatacgtatcacccaatgaaataaattgctcttcgataagtatcccatctatataaatcaatgggataccgtcacacgaagaagcaatcttctgatcaaaaccaatcaacatatcattataagttttgtctggaatctccgtatcaggatcgatcggcactggttcaatttccaagattggaactactttcgccttcacaatcggttctagttgacttaatgctgtaaactctgcccgcttagtttttaagattggaacataggaaattccttgcacgtaattctccttttagatacgccaagtagaggaatctccagtatgttaaacattagaatatctaactttgaagcccttcacaaaacagtgaattcttcatctattacgatttttaataaacatccctttatggttgtacctatttcccccaaaaaattatcactcataacaccaccgccagcgcatacacacagcccacgaacgccgccacatagcagcccaagaacacccacaccccgattgataatctcttcacgatctccccctattctctctctgctcacgccagtaattcaggcgtgctctgaaatgctcccggtgctgttccggtaccgcgtcgatcgcgtctaaaacgtctgtgcgggtgactttccgcgcatacaggtttttgattaagcgactagcctgcaggtcgagattttcaagatcccgatattcctgcggccaggctccgcgattgaacggtaagccgggcgggaggtaatccgattgcccggccatgggttacaccatcgcttctagggttctttccgagttgacgtaaaactgcccgtcaacgtgttccagggtgaattcaggtaccggtgtttcgtgtcgggttattttgacgaagggcgaattaatcatcgcgagaacgcgagtttgtagcacccggcggctcatgccgtggccgggatggaatttatcgagtgcggccagaatggcggtgtaagacagggttttaccgagcatgacggcggcaagtttgctggcggggaaatccaccttttgggcttttttcttcaccactttcttgctggtagtcgccttgcgatcgtacttcggttgcataacttgaaccggtaccggcgctgggacgaatggcgacccggtacgagcgcgggctttagcgttcatgttccaaatgatcaccgcggtgtggtcacaaccgtcatcgatcatggatggggatttagcgtaaacaatttcagtatgcatgttggtctttcctgttggttattacgcgctggtcaggcgctgttaaaactttttggttgagtaaggtctttgcttgggttgttgctgttgcgtctcctggtgcatgcgtgaggcttcctgagccacgatttgatccactggcaagaagtggccgtttttaaactcctggtacacgaggccgtttggcccaaagcggtttttacctaggatgatttctgcatagcgtgccgccgggcctgtcgggttataaataccgtcgcggtacagcagaatgatccgatcggcgtcctgctctatgcggccagattcgctaaggtctgacattaccgggcggcgggcggtgatcgggcgttcatcgacttttcgcgataactgattgagtgccagcaccggcgttttaattctcatggccatagtttttaggctgcgggaaatatggcccatggctatatcgttacgctctgccttcggcttggcgataaggcccatgtaatccaccatcacaacaccaaggtgcgggtaccggcgtttatgggtctcggccacggcgcggatctgatcgatggttaaatcggtggcgtcaacaatccagatatcccggccactgagtgtttctaaggcgctatggatgcggccccaatcttcatcgcataactcgtttggactgcgtaattttgaaacggaaaggttgccagctccggcgactgagcgctccaccatctgcagtgctgccatttccatgctgaaaactaacgcgcctgcgccgttgcgggtggatccctcgatcactttcagagcgaattctgttttgcccgtaccaggtcgcccagcaaccacaaccagatcctgcgggttaaagccgccggtaatggagtccagctcatcaatgccggtgtacaggttctgtgagccagcttcgccgctcatgcgcttgccgaggagatccatgtagctatccagcagttcgccaaggtgtaccggcaccaccccgccgctatcggctgtcatctcgatcagcttggatactgattcctgaataacctggtcgcgttgctcttggtttctggcaccacgaatgccatctgccccgctctgcagcagcgcggccatttcacggctacgccatcccttgactgcgatattcgcaaagcctttgaggttggacagcgtgccaggcatccgcgatatctcaacgagcgaggacagcgacgaaccgccgaggttttcactgatcagcaccacatcgatcacaccgtacgtcagcgcctgccgtttgatttctttgtaggcttcacggtgaaaccggatgctgaaagcctcttcgggcatggtggcgatcacatccagcgcatccggtgtagccccgccgatcagcaggcctgatagcacacacgcttccagttcctgaggtgtcatagcgcgccctctcgggttttcaccagcacgtcagaacgcagcaggtaatcgaatccagcacgccaactccggttgttatcgccaaaataaaacgggccagctgcttcactgaaggtttcgaagtaggcttttacagcatcgaggcttggatcatgcagttcgcccagcaggcgtttgatttggcgtttgcgcttctcgttcagctcttgcaccttcggcagtcgatcacccaaaatttcgttgtaggcgtcagccacttcttgatatttaacttttggaagcttacctggcgcgtcagcgtcatccccctcctgggggttagggggtgattcattgactggttctaaagactgactgattctgggtgcaggagctgcaccaccccctggtgcaggagattcaccacgtggtgcaggatttgcaccatagggtgcagcatttgcaccactacccggtaaggctaggtgataaacatttgagcgatttagcccattctctgccaggcgtttttcgatgcgtatcagcccatctttcaccagttgctgaatgtgattttgcaccgagcgttccgagatttcgcactgctcagcgatgtacggcaccgatggccagcattcaccctgatcgctggcattgtcggctaacttcagcagaacaagcttacgcaacgggttacccactttgactttcatggcgcgcaccatcaattccatgctcataatcagactcccagcgcttccgcgatctggcggcacgcgtcctggtactgctccggcgtcagtttaagactctgcagcgctgccttgctctgctcgtattgttcccagattgatagagccgcaatgcgccgcccttcgaaaatgtgttcgatttcttcctgcgttaccggcataccgttcaatcggtacccgttacgccaggtgatcctgtcgatagaattaagcatgttggtctttcctagtgcggtcggttaaacgctggtcaggcgttgggtgttctgcaatgcgttcagtgctccggcaatcagctgcggggtatcgttggcgcccaacaggatcgcgataatcgccgctgcaaactcccgtatggccacggacagcaaatattgaaccgatgccccacccaaccgcgcccggcgctctgctggcagtgctgcggccattgcgtcggccatttcccggatctttgcccgcgatgctttcgactcgccacgcagccagcgaaaaatagcctggcggttggtgttgatcgcccgccagtcagcacgcccgaattcatcctcgatcggatacaggcgtactgtttttgactcggtaccgaacagcagccacatgcggctgatctcgatcgctacatgttcctggccgcgttcagctgcccaccctgcaatttcgctttttaatttctcgatgttttccacttgtcgcgtctcctgtcgctcgaaacttgattacgcgtaatcagatttcggtggttgtcgttgttaagctgcgtctggtgagtgtgtctcaccaccgtacaaagctgggtcatacttaagagcaccaccggttactttctccaggcgagctgcgcagcgttccggaatgagatctccccagcgagatacagcagcttgagaaacccctgcggccttggccagcttggttttgctgacgaagaattctattgcgtggtcttttaacacgttcacctcctgtcattaactttgattaggactttatgacttaacatatgctaagtcaaattaatttatattaacccctatgaaaatcgaaacgctgcacgagcgcattaaagcgcgtagaactgaacttaaaatgtcacagcagaaacttgccgatgctgtgaaggtttcgcacgtcactattttcaagtgggagaatggcgatacggagccaaagggaaagaacctcttcagcctggccaaagtgcttaaatgcactccgacttggttgctgtacggggatgaagccagcaccccactacctgttgatgagctaccgaccgaactggatgaaagacaacaaaaattattagacctgtttgactctcttcccgaatccgagaaagaaaggcacatcgcggatctcgaactcaaggttgatggattcaacgctttgttcgaagagctgctcatggcaagaaaaaactcaaagaaaaaataagctaaaattcaataaattacccctccccagcttgcaacttaactttttgtaagtaatttttattgaccaattacttacctttagttaagcttcattccatcaacagcgcacaacaatgcagcggttgttcagataacaagttctgacagcgggaaagaccgcaaaaatttgggatgttgtggcaatggagaaccgaccgcttatcgcgtgatgcataaagtccatgattaccttgccacagcaacccaaacatcatgaccacagcacctaaccagtgctgaaaccaaggaaagaccaacagcctcaccagggcgaatacggtcgctagctctgaccaagcgaaacgacgccggataacgtaaccggtaacctttagacgtaaaaaagcccaccgaagcgggcttaattacctcaacgggaaccaccccattgagagggtgccgggaaccaccccgaccttacttaggaaagaccaacggcttacgccactgatctacgttaattatatcggagttgctatgaaagcactacagataccagtcacgctgtacatccacgttaccacctatccattatccgaaggcttctatgtctgcacctctgacatgtcgtctttccgtgggaacgtgttgattgaaacccgccaaatcttcatcgacgttaaccagccgggaccgatcgacattatcggcaagcaggttgaagcgctgcaggcccaaaaggccaatctaacccaagcgacctatcaccagatcgccaccatcgatgatcagatccagcagcttctttgtatcgagcattgcccggtaaccgttgacgaactgccgtattgaggtgagccatggatatcaattctgttatcgacaaaatcgtcgctgcgggcctctctgttttcgagcatgagaacaactgcgattacagccacggcacaaagcacatcaccatcattggcggtaagcgccgcgttgagttctaccctaccaccggcatggtttacgcgaatgccgttaagggtgaattcaaggccgtgcgcttgccaaaatctaacgtcaaggcagccattcgcctggcgatgaccggccaatactaaccgcgcctgaccagcgcttaaccataggaaagaccaatatgacaacccctgtatttattggcttattcgagccaaaaaaatcagcacagaaaaatggtgctgttgcccttgtctttgcagataaggcgccaagcaaaaaggccgccgaaagcatatttattggcaagctttgggaagcctatcccgctgccggtgataatttcttcaacccgaaagttgtagaagatcagcctggtcacccccgccctgcgctgggtgttttcgatgagcagttcgctattgataacgagtttgacgggaagtgctggaaaccgcgtgaagtagtagaagagttgcctgctggcccggtcgatctgctgaaagaacccgccgacgtcaaaatcgcagcggtggcgctgttcgggcttactgatatcgatcagggcatgctctcaactgtcgttgatgttctgaatgatgatgagtcacccgacgatacagggatgaaaaatgtaattaaggcgcttgcagctaatcccgctgtatgtgcgatgtacccacatgctatccatgagctgatcgaggctattttttctcattacagcaatgaagcacctaccgagtttaacgccggtattttcgccaaaaagtgggttaacaatccgcgagatcgtgaccaatccagcaccagcaccagcaccagcaccagcaccgaagataacggcggcgtgtccgattacaataccctgagcatgcacactgccctttccattatggccattcacccctcgggcgctaaagctggtgatgtgaagaacgccaaagagatcattgcgtcgcgtgattccgtttggcgcgcatgggataaaaccttccgcgttatcaccggcatcctcgatgtagatactgatacccggcactccatcatttcggatggtcttaaaaacctgaaactggttaataacgacgacgagcgtctgcactttgttaaatcccgtctggccggtaacccttcttgcccggaactggcgagctatggccaacagacagaatcaccgctagaagtagaaaaccttggtgatggcaaatttagcgtcgaaggtctgctcggcgaacagccggttatcgcctcaaatgagggtgaaaaaacggaagtggccaccactgaaccggtcagcgatgcggcggccctgcaggctaaagaggcgctagataacttgggttacggcgtatatgcaacagagccagagcagaaatctgaactactgcagcgtgcggaagataacgcagcggcggccacacagttggtacagcagctgcacgccgatgatttccagcaacgcgccaaccaggtagagcaagcgcttgcagatcagccgcaggaagatcgtgacaacctagggatctggaaccgggtttataagaccgacgccaaattcaccaaggcattcgcgaacaatggcggtggtacctcgatcaacggtacctacatggttatgcaggcaaccaaggtgtttggcccgcatggcattaactggggcgttgatgttctcgaagagcgtttcgataacggcgcgccaataatgcagcccgtcaagcagccggacggcagctttgctaaaggcgttatctctaatggtgccggtgggtacctttgtgaagtgaaccacaccgtaaaaatccgactttggtataagcaggacggccagaccggcgaagttttagcgtacggctgtactccgtacatttacggaagcaacaaaaacgtcgtaatgagtgacggcgaagcccctaaaaagtcgctgaccgacgccaccaaaaaagccctttcacaacttggtttctctgccgacgttttcctcggtctgtatgacgatgttaactaccgccaagagaacgacgccgagttcgccctcaagaacgccagcgacaaggccgaaggtgttacccggctgcgtgaagagctggacgagaagctgaccaaagtcgccgagacaatcagcaaggccgtaacggttaacgaggccaccaaagtacacgcctcgatcgcccgtgaagtggacgcccaccgtaaagccgccgagggcaaaggcgatacagagcacgccaaatacttggctggtcgcctacgccgcctcaccaccctgaaagatgaacgcatcaaagccctttccgcttccgaggagaaaacccaatgagcatcacagccatcgcattagcatctgattacgccaagctgcagcagttggtcgaaacctccgacgagcttaccccggaaatgatcgccgacacgctggaaggtatcgagggcgccctgggcgataaactggacgcgactttcgcctatgttcgcaatctcgaaggtctggcaaagaccgttgacgaagaagttaaacgccttgctgaccgtaagaaatcgttcgagaaccgcgccaaatccatccgccagtatgtcctgatgtgcttactggcatctggccaggacaagctaaagaccacaaccaatacgttcacagcggccaaagggcgcgccagtgtggtgatcgataacgtcgatttgttacctgatgatctggtggcagtgcaaaccctggttgcccctgacaaaaaggccattaaggaagcgatcgaaaacggcgtggacgtcaagggcgcccatatcgagatcggcgaacgtacgctgatggtgaggtaacccatgttgagaagaaaccaaaagcgtggcgaagccgcatacatcacactgcccgacggccgcaccggtaccatccgcaccgatcgccgctgtgatgtggaatacgagctgccggccgatgtgaagatcagcagcaccccgccacaaaagttgattaagcctaatcagaaataaccgcccatcacctgcattgtggcaacccaataaccaaggggaaccacaatgcaggcatggcaaccaggcgcgcgcctactctctgatttcgatatcaagataggccgcttatccgcaagtgtgcggaaaaaacaactcagtgaagaagacatcatccgggcgtgtcgtgtgaccgacgacgcaatcgccctggtgattaaaccgaggaaagaccatgccaaaactattgaccctgggggagtggaatagccgccttccccgtccacgcagtaaagaaaccgtccgtcgttggatacgcgcagggaaaatttaccccgcgcctgtacttgatggccgggagtacctttttgatgaacgggcagaaaaaatagatccgctgaatccacgcgggccaatcaattctttactgtcgagaatcaccaatggcaaggaacagaaaccacatgcgccgcgatcttcctccaaacctgtacgttaggaataacgggtactacagctaccgtgacccaagaacggggaaggagttcggtcttggccgaataaagcgtgatgcaatcaatcaggccattgatgccaatctgcaactcatggaaacccccaccaggctggtagaccggataaacggctcccgatgcataacgtttcacgtctggcttgaaaaatacgaggggatcattaaggcccgcgatcttaagaaaaaatcattggatgagtacatcaaccgggttagcgcaatcaggacagggatcgctgatgcagaaatcgacacgttaaccactaaacacatcgctgaatttctcaacgattacgtgagcaaggggaaaaacatgcgtgcaaaattactacgttctacgcttaacgatatttttaaagaggcggttgccgctggccatattcaatttaaccctgtcgatgctacacgtacccctaaggcaacggtgcaacgcgaacgcctgagcatagaggattacttcaagatccgcgcggctgccgacagcatgcctgcatggcttgggttgagcatggaattggcgttagtgacggggcaacgattgggagatatcagcagattaaaatgggaggatgtccgggagggcaggatctggatagtgcaggataaaaccggggcgcgtgtttcgatctcaacggatatcgaactgattcaggcccggctgcgcctgagtgatatcctccagcgttgcgagctgcattacgctcattgcgttaacatcatcgcgaaccaggcaggtggaaccttagctgcgagcacgatctcgatggcgttcacaaacgcacggagagcatcagggattgactggaaaacctctcccccttcgtttcacgaactgcgcagcttatcggcaaggctgcacaaaaaagaaaggagcgaggagttttcccagcatttacttggccacaaatccgcagaaatgacggccaggtatcaagacgaacgcagcgaaaaatgggtactcgtttaaaccagttttgacctaatagtgaataatagtgacctatcacacataacaaattgatatatagcgatttatttttacactatctatcagtgtgataggtcaaccattgcgagccgtatcggtaagaacccacttttgtagatcggcaaacatcgcctcccattcctgctgagtaatatccatgaagccgaagaagcgcagcatgaaggctccctcggtagccaagaaggccaggcgcgcctttctccccgcttcggtggtcagatccaaacctgctatgcggctgcgataccattctcgcgtactgtccagatgttctggcgtctgaattaacgtcgccatcaacccggccgccttggcgctggaagcctgatccgaactacgggtagcctgcatatgcgcctggacgatggttaacgggtccggatcgctgcccgcgatatcgtcaaaaacctgctcataaaccttgccccaacgatcaaacatcgcatcgataagcgcatctttgctaccaaagcaatattgcactccccccttggagatccccatggctttagccaccgaatcgatggttaaccctgccgcaccttgggtcgccacaatctcttctgcggtatccagcaccttgtcacgatcgatactccgttgacgccccattgagaaagccccttttcaatacgtacgtatggatttatattatagcagtataccaccggtgctaccgggtggttaccgtaaggtgacgcagccgcgtcatcggtttactaggatactctttatgcacgcccaaaaccgctggctgatcctggcaatgatctccagtgcgctatttttaatcattactgatatgacggtgctttacaccgcgttgccgcgcctgacccaggcattggatgccacagcttcgcaaaaactgtggatcgttaacgcctacccgttggtggttgctggcctgctgcccggagctggcatgttaagcgaccgtcttggccacaagaaaatgtttatcgccggtttgccggtctttgccttggcctcactgtgcgccgcgttctcccccagtgccgagctgctgattgcgtcacgggctttcctggccatcggggccgcgatgatgatgcctgccacgctatccatcgtgcgccacgtctttaccgatgagcgtgagcgtgcgctggcaattggcatctgggccgcagtggcctccggtgccgccgcgcttggcccggtggtaggcggcgttctgctgtcctatttctggtggggctcggtatttctgatcaacgtgccggtggtgatgctggtcctgccgctggcggtctatctgatccctcgttgcggtggagacagccaacgcccctgcgactttattagctcgctacagatcatgttcggcctggtggcgtcgatctatgcgctgaaagagctgagcaaacccgcgttctccctgagtgacttcgccattgcggcggcgctcggtacgctgttcctaaccctgtttgtccgccgtcagcaacgggcgcaataccccatgatcgatttctcactgttccgtaatcgcctgtttgccagcggtgtcggtgtagcgatcgtttcaatgatcgcgctgatcggggtcgaactggtgttaagccaacggttacagttggtgctaggcatgacgccgctgctggccgcgttgtttattttacccattccggtagcctctgctctggctggcccgttggccggggccttgctaccgcgttacggcgaacgctccatgttggtaggcggctttattctcaccgccttaggcattgcgggtgtcgccctgtggtatcaaggcaacgtcattatgcagttggtctgcctgtttgtggtgggctttggcctcggcggtgccatcaccgctgcctcaacggccattatgctcaatgcccccgaagacaaggcgggcatggtcgccgccattgaagatgtctcgtgggagttgggtggcgtgttaggcgtcacgctactgggcgggttgatgacggcggtctatagccacagcctggtattgcctgccaatctgcccgtaggcgatctcgcttatgacagcattgatgaggcattacggttagccggaaacatgggggcggatagcgcagaaaggctgacccagctggctagaggtgcctttgatcaggcctttattgccgtactgatcgcggcagcgctgctgactaccctgagtgccggggtattaaagtttgctttgcgcaaaaagtcaccgcattattttaatcgctaacgttaagggggcgctgtatgcagcgcccactcaagccggttgaggaatatcggttgtcttcttatacttttgtggcttgctcaagtaacaacgctgcggcttgaaagacgacgggtaaattggtttgagcgattgaattgatgcttagtagcaactttaaccttatgatagatccggttaacctgttttgtatggatatcaatctagataatcgaaacaaataatcaggagaagattattatggcaacggcaaagaaagcgaccaagactcatatcggcctggataccaaacaatcagcaaaactctctgaagcactgaacgccctactggctaactaccaggtgctgtacatgaacgtgcgcggttaccattggaatatttccggcccgcacttctttgaactgcacgtcaagtttgaagaaacctacaatgacctgctgaccaaggtggatgagctggcagagcgtattctgactctgggttcacagcctcgccacgccttcagtgactatctgaaaacggcggatatcaaggaagacaccaatgtgaccgacgataaaggcaccctgcgcggcttgctggaaggttacgccattttgttgcaacaacagcgcgaactgctgacgctggccgcagaggccggtgacgaaggtacctcttcactgatgagcgattacatcaaagagcaggaaaaacaggtgtggatgttgaacgcctatctgggtaaataatccaggtccagcaaatagcagaacagcccgttacgggctgttcttttttttaccactcataagccacaacgaacaataaggctctgcgatgttgatcgtctaaacgacggcgaacacgaatgatatgccgattgctgcacgactggcgctccagccaacggtgcctgcgccgctggctctgccgtaacatcctccagcggcccacttcatttctactgcgtctcattttacgttacccatcaatgccaaccgccggcattatagccctttcaacgcgcgatccaagtcgagcgttgaccaccgtcaccctcccacagacgacaaaaagtatggtttttattttcagcaagtccctttagtcaatcatttttatgtaacttaactaccgagaaaaggtttcacctttgttgttctgtgcgtacactcattattggtggcttacgaacggaaatttttgcctttatgacaaccttttataccgtaattagttggctcttggtgtttggctactggctgcttatcgccgggggcacattgcgtattctgatgaaacgacgcacggtgccttcggccatggcctggctgctggtgatctatattctgccattggtcggtatcgttgcttatttatcctttggcgaactgcacttgggcaagcgccgcgcagagagagccaaggccatgtggccttcaaccgctcgctggttgaatgagcttaaaggaagcagccggatttttgctaccgaatatagtgaagtggcccgcccgctgttccagctttgccaccaccgccaaggtattgatggcgtcaaaggcaatcagctacagctgctgacgaccaccgattcaacgatgaatgccctggtgcgggatatcgagctggcacgtcataatatcgagatggtgttttacatctggcaacccggtgggctggtcgatcaggttgccgaatcattgatggccgccgcacgccgtggcgtacattgccgtttgatgctggactcggctggcagcgtacagttcttccgcagcccttatcccagcatgatgcgtaacgccggtatcgaagtggttgagtcactcaaggttaacctgttccgcgtattcctgcggcgtatggacctgagacaacatcgcaaagtggtgctgatcgacaattacatcgcctacaccggcagtatgaatatggtcgatccacgcttcttcaagcaggatgccggggttggtcaatggatcgacctgatggcacgtatggaaggcccggtggcaaccacgatgggtatcgtttacgcctgtgactgggagatcgaaaccggcaagcgcattctaccaccgccgccagacgtgaatatcatgccgtttgaacaggaaagcggccacactatccaggttattgcctccggcccgggcttcccggaagagatgatccatcaggcgctgttgacggcggtctattctgcgcgtgaacagttgatcatgaccactccctacctggtgccaagcgacgatctgctgcacgctatctgcacggcagcgctgcgtggcgttgacgtcagcattatcgtcccacgcaacaacgactcaatgatggtgcgctgggccagccgagccttcttctcagaactgctggaagcgggcgtgaagatttatcagtttgaaggcgggttgttgcacaccaagagcgtgttggtcgatggccagctcagcctggtcggcacggtcaatctggatatgcgcagcctgtggctgaactttgagatcaccctggtgattgacgacagcggttttggtgccgatctggcctgcgtacaagatgattacatcgcccgctcgcagctgttggacgccaagcaatggttgaagcgcccttactggcaccgcctggtcgaacgcctgttttactttttcagcccgttgctgtaaaagcggcaacgagcatggtttaataacctcaaatcatttgttatcaggatttttatatggacttgaataatcgccttaccgaagatgaaacgctggaacaagcctacgacatcttcctggagctggccggcgacaatctggatcccgcggatattctgctgttcaatttacagtttgaagagcgcggcggtgccgagctgtacgatccggcagaggactggcaggagcacgtggattacgatctgaatccggacttttttgccgaggttgttatcggcctggcggacagcgatggcgagcctatcaacgatgtctttgcccgcgtgctgatctgccgcgagaaagataacaagctgtgccacattttgtggaaagaataagccggttaacggtataaaaaaacctgccaaatggcaggttttttattattaatcaacccattacaacggatcaactttcaggcacgataccgcatgacggaagctgccttccagcaatggacgcgttttagcgcattccggcccggcaatcgggcaacgggtgcggaatacacagcccgaaggtggattgattggcgatggcagttccccttccagcagttggatctgcttttccttctccttgtcaggatccggcaccggaaccgccgacatcagcgccttggtataggggtgctgcgggttatgatagacttcatcataggtgcccagctccaccgcatggcctaaatacatcaccagcacccgatcggaaatgtgtttaaccaccgccagatcgtgagcgataaagattagcgataaccccatctcgcgctgcaattgctgcaacagattcaccacctgcgcctgaatagatacgtccaaggcggaaaccggctcatcacaaatcaccagtttcggttccaggatcaaggcgcgggcgatgccaatacgctggcactgcccgccggagaattcatgcggataacggttgatcaggttcggcaacaggcccaccttcaacatcatcgctttgaccttatccttcacttcctgacgcggcatttttggattataggtacgcagcggttcggcaatgatctcaccgatggtcatacgcgggttcagcgaggccagcggatcctggaaaatcatctgaatatcgctgcgcgtcttgcgccaatcggcatcgttcatgcccagcagatctttgcccaaccaggcaacgcggccactggtcgccttcaccaggccgataattgcccttgcgaaggtggatttaccgcagcctgactcccctaccacccctagcgtttcgccttcgaacaggcgcacggtgacaccgtccaccgccttcagcgttttaggtgcctgccagaaccactgcttgtcatcatgaatatcaaagtgaactttcaggtctgcgacttccagcagcactcttttatcggttgcggtcataccaacgcctccactggcttgaaacaggcgcgcaggcgcccctcaccaaactgctccaatggcggagcactcgcgcactgctccatcgcatacggacaacgcggttggaacggacagccttttggcaaacgcagcaggttcggcggattaccagggatggtcatcaacgcttcaccttcggcatccagacgtggcaccgcattgagcaggccgatggaatacgggtggctcggatgataaaacacatcgcgagcgctaccgtattccatggtgcggccagcgtacatcaccaagaccttgttgcagatcccggcaacaacgcccaaatcatgggtgatcatgatgatcgccgtattgaattcacgcttcagttcgtttagcagcgtcatgatctgtgcctgcacggtaacgtctagcgccgtggttggctcatcggcaatcagcagttttggtcgacatagcaacgccatggcgatcatcacgcgctggcgcatcccgccggaaaactcatgcggatacatacgcatacgcttacgggcttccggcattttgaccgcatccagcatgcggaccgactcttcaaacgcctcgcttttgctcattttcttatgcagcatcagcacttccatcaactgctcgccaacccgcatataagggttcaatgaggtcatcgggtcttggaagatcatcgagatctcttcggcccgcagcttgttgagctggctttctggcaggttgagaatttcacgtccgttgaattttgccgagccaccgatacggccattgctggccagcaggcccatcaacgcaaatgccgtctgtgacttgccggaacccgactccccaacgatacccaaggtttcacccgcgcgtagatcgaagttgagatcgttcaccgcggtgacatcgccgtctggcgtaccgaacgtcacacgcagatctttgacgtccagcagcagtccgttttgtggttgagaattaatgctcatggttgcactccttaacgatctttcgggtcgagggcatcacgcaggccatcgccgataaagttgaaacaaaacagagtgataaccaggaaacaggctgggaagagcagcaaccacggcgatacttccatcgagttggcgccatcgctcaacaatgcgccccaactgctcaacggctcctgagtacctagccccaggaagctgaggaaggactcaaacaggatcatgctcggcaccagcagcgaggcgtataccaccaccacgcccagtacgttcggcacgatatgccgcaggacgatattgcgagtcgatacgccgcacaccagcgccgcttcgataaactctttacgtttaaggctgagcgtctgcccgcgcacgatacgtgccatatccagccacgacaccatgccgatcgccacaaagatcagcaggatattttgcccaaagaaggtcaccagcaggatcacaaagaacataaacgggaaggagttcaggatctccagcaaacgcatcatcaccgagtcgatcttgccgcccagatagccagacagagaaccgtacaaggtgccgagtaccacagccaccagcgccgcagccacgcccaccatcagcgagatacgtccaccaatggccacgcgcaccagcaggtcacgccctgaggagtcagtaccgaaatagtgccccgactccaggttaggcgcggcggacatcattgcccaatcggtgtcatcataagcaaactgcgacagccagggggcacagatcacaaacagggtgatcagcgctaacacaaacaggctgggcacccccgcacgggtgtgcataaagcggcgacgagcatcctgccacagactgcgcccttcaacttccagctgttcgctgaagttttccagagcttcgctgttctttttcgtcaacatcttgcgtgctccagcttagtaacggattttcggatcgatcacggcatacagcacgtcaacgatcgcgttaaacaggatggtcaagccgccgaccagaatggtcaggctcaacaccagcgaatagtcacggttcagtgcaccgttaacgaacaactgaccaattcctggcaggccgtagatggtttcaattaccatcgaaccggtgataatcccgacaaacgcgggccccatatacgacagcaccggcagcagcgcaggttttaatgcgtggcgcagaatgatacggcgcatcggcaaacctttggcacgggcggtacggataaagttggagtgcagcacttcaatcatcgagccacgagtgatacgggcgatgctggcgatataagccaaagacagtgccaccatcggcaggatcatgaacttcagcgccccaccattccagcccccaccgggcaaccacttcaaggtgatggcgaatatcaacaccagtaagggggcgacaacaaagctggggatcaccacgccggtcatggcgaaccccatcaccgtatagtcccacttggtattctgcttcaacgcagcaatgacgccagcgctcactcccagcaccaccgccagtacaaatgcggcaaagcccagtttggcagagaccgggaaagatgccttgaccaggtcattgaccgaataatctttgtatttgaacgaagggccgaaatcgcctttcgacagttgcaccaaataatgcccgtactgtttccagatcggatcgttaaggtgatatttggcttcaatgttagccaatacttcaggtggcagcgcgcgctcaccggtaaatgggctaccgggtgcaagacgcatcataaagaacgagatggtgatgaggataaatagtgtcgggatcgcctctaacaagcgacgaaagataaatttaagcattgccctaaccctgtgcttgagcctgataacggcttatagtcttaaaataggctggcgacccgtgtcgccagccctggccgcatcaatgcttgatgatgtacaggtttttatcgtaaacgttatcaagtgggtctttgccggagtaaccccccacgtaaggtttcaccaggcgagcattcacatagtaataaagcggaacgatagcagagtctttatccagctgaacttcggctttctgatacaggccagcacgctcttctttggttttcgccgtcaacacgttagccatcaacttgtcgaattctgcactcttatagtgcggagtgttactgctactgtccgacaacatcatgttcaagaaggagcttggttcgttgtagtcggcacaccagccagcacgtgatacgtcataggtgccctgatggcgtgtatccaggaaggttttccactcctggttcaccagcttcacgtccacacccaggtttttcttccagatagacgcggcagcaatggccagtttcttatgcagatcggaagtgttgtacagcaatgagaaggtcagcggtttgcctgggccataaccggcttcggccagcagttttttggcttcttcattacgcttttcctgcgtccagccaaaccactctggcggggtcaacttggcaccgtcggtgtaaggaggagtaaagctgtaagctggcaggtcaccctggttcttcaccttgttgacgataatgtcgcgatccatccccagcttcagcgcttcacgaacgcgagcatcggtgaacggtgctttttggttgttgatttcgtagtaataagtacacaggtaaggatcaacgtgcacttcgttcgggatctcttttttcagcttctggaacagttcgatcggcatgttgttataggtcatgtcgatttcgccggtacggtagcggttgacgtcagtgacttctgaagcgatcggcaggaaggtgactttattaatgatagttttggcgttatcccagtattgcgggttacgttccagcacgatacgttcgttaaccacccagtctttcagcttgtatgcgccgttgctgacgtagttctgtggcaaggtccacttttcaccaaacttctctaccgcttctttattcaccggcttcatggcgtagtgcggggtcatttctaccagatacggaaccggctcagtcagcgtcacctggaaggtatgatcgtcgatggctttcacgcccagcgtcgatttatcttttttacccgcgatgatgtcatccacgttttctacgtgggcatattgcagatagctggcataaggagaggcggtttttggatcaaccaaacgctgccagctatacacgaaatcttgtgccgttaccggctcaccgttcgaccatttggcgtctttacgcaggtggaaggtccacactttaaaatctttattgtcccagctttctgcagcccccggcaccactgaaccatccaggctgttatttgccaacccttccatcagatcgcgcgtcacgttgttttcaggcacgccttcgatcttgtgcgggtctagggattgtacttcggaaccgttgttcttaacgatttcctgcttgtctgccagctgtacgcctgctggcacatcagccgcaaaagcagttcctgccgccgtaaagcctagcgccgcaataatgcctgctgccagcagggacttcttagtgatgttggtcatgtgtataaactccagtttttattatcacaactccgtcgtgggagctgcgttgcccgttaaccgggggttgctatggctggacgccgtggaacgaaacggcgctgcctttcctgtgtattaccggccactatcaccgctggtaacacccttcattactgcttgatgatgtaaaagtttttcagatcgatatagtcttgcggatctttgccggtgaaaccaccaaccgtaggtttgaccaagcgcgcactgacccgataataaaccgggaccagtgcagaatctttgtccagcaaggtctcggcttgttgataaatggcactgcgtgcagctgcgtccggcgcttgcagggtgctggccatcagcgcatcgaacgccgggcttttatagaagaaggtgttattgctgctgttggaaagcagcatattcagaaacgcgctcggttcattgtaatccccacaccaggtggcacgggccacatcaaactgcccttcatgacggctctgtagcgaggttttccactcctgattttgcagtgtgacctgtgcgccgaggttcttcttccacattgaggcagcagcaatggcctgctgcttattttgatcggaggtgttgtacaacagggtaaatttgagcggcttctcagcggtgaatcccgcctgagaaagcagtttcttcgcttcttcgttgcgtttttcctgcgtccacccagcccactccggctggctgaagttgcccccctcggtaaaggttggcgtaaagctgtaggcggggatttggccctggcccatgatcttgttggcaataatgtcgcgatccagcgtcaatttgacagccgcacgtacgcgctcgtcggtaaacggcgcacgctgattgttgatctcataatagaaggtgcacaggtaagggttaacgtgcagctgttctgggatctcgcgtttcattttggcatacagattcggcgggatggcgctattggtaatatcgatttcaccgctgcggtagcggttaatgtcgctgacctcggaggacaacggcaggaacgtggcctgctcgatcaccgtcttgttgttattccagtagctcggactgcgtacgagcacgatacgttcgttgacgacccactcggataagcgatatgccccgttgcccacgtagttctgtggcagtgtccacttgtcgccaaatttctcgactaccgactgtttgaccggcttcattgaggtatgggaaagcatactgacaaaatagggcaccggctcgctgagcgtcaccttcaacgttttatcatcaatggcgctgacaccaagcgattcaggcggtttcttaccggcaagaatagcgtcaatattttcaattcgtgcgtattgcaggtagctggcataaggagagcccgttttgggatccgccaagcgctgccagctgtaaacgaaatcctgcgcagtcactggggaaccatcgctccataccgcccctggacgcaagtggaaggtccaagtctggtaatcagtgttttcccagctttccgccgccgcaggggccagatggccattggcatcggtgctgatcaacccttccagcaggttgaggataatattgctttcaggcgttccttcgaccttatgcggatccaacgaagcgacttctgaaccgttgttgatcaccatgcgctgcagtggtgccaattgcacaccggccggaacctcaacggcctgtaggttttggctggcgatcatccccaacacggcggcgatgataacggccaacggttgatgcttcgtggtttgcggcatagtacaggctccttttcactgctaagcaataatggtgaaatagttatcaagcaggctaaataaacagataccagcaaaaatcattcctatctggcacgccaaagataagatttttccgtctgacaagttgctcggaaattagcagaagcaaaaattcatagccaataatttttacagaaatgttaagcatttctcttttattatcccatagccctacagacacctagccttcccacttgccccaagagagattaataccatgattttattagataaataacagcttcacttttaaccttttcttctcagatgaaaaaaaccactcaaaagaaacattcagttaacaaaaacgccgttcagagaataaacacctgcctatgcgtggttaatcactaataacacctgtgcgaaacggagacaagccctacagaatgatgtgattaaattaacaacagttttacccatagggagacaaaaacccccgccacggggattataaaagtggagaaaataacatcttggtgctttatcaaccgataaagtgagatttgtgccacaggattgggcaatagaatgaaaagcaggcaggttatgcactttaataatgcattggctgagataatttgaaaaattaaaaataacttaagccgcaaacaagattatccgcggctttattaaggttataacagcccagggaaaatggctttaatcccggtgacaataaattcgatccccagcgccatcaacaacagccccatgatacgggtaatgacgttgatgccggtttgccccagtagacgcaccagcagcggagctgcccggaacaatagccaacaacagaaagcgaacaaggcgatcgccacggtaaaacctaacaggttctgccaactgtggtaacgagagctccagacgatggtggaactgatggcacccggcccggccatcagcggcagcgccaagggaacgaccccgatgctttcacggatcgcgctctctgatttttcctgcttgttctgtttgtcttcacctagcttgccgctgatcatcgacatggcgatggtcaccaccagaatgccgcctgcaatacggaaagaatcgatagagataccaaacatacgcaatatgccctcgcccaggaacagcgaggtccacaaaataatcgccaccgacaggttagccgtcaggttggttttgttacgcccgacctcggcctgatagctggtcatgctgataaataccggcagaatacctaccgggttgaccaacgcaaacaggccgacaaagaacttgatgtagccggaaaaatccaacagagattggcccacgaaaaactccgcataaatagctgtaaaaagagacactgccgatgcgcgctaatgtaatggaattacgtcagctaatccatccacccagacagcatttttccctaccccaacagaatgttacaaaacaattcgctattgttaatgccttgtatgttgtttgctgacatcaggtatcatctcatccaccatcaaacacattgttgataatcgctctcaacaaacgccagctgaaaggtgtcagcatgcgatttttatgacgtaaatcacaaaatatctactcaggaatagttaagctcttagtcgtagtcaaaagggagtacgaggtagagataccgatttctctctcgcttgcctactaccaacttgcacttggtaaagctctttaagtaaatcagcagtatgggtcgctaactgcgggaaaagtctcattatttaacagacgccttcctgacagatgtctatactagttcctcgaacggcttatttactgaaagagtttaacatttatcaggagagcatcatggctgtaacgaatgtcgctgaattgaacgagctagttgcacgtgtcaaaaaagcccagcgcgagtatgccaacttctcacaagagcaagttgataagatcttccgcgccgctgccctcgccgccgcagatgcccgtattcctctggctaaactggccgttgaagaatcaggcatgggtatcgttgaagacaaagtcatcaaaaaccacttcgcttccgaatacatctataacgcctataaagacgaaaagacctgcgggatcctctccgaagatgaaactttcggtaccatcaccattgcagagccaattggcctgatttgcggtatcgtgccaaccaccaacccaacttctaccgcaatcttcaaagcgctgatcagcctgaagacccgtaacggcatcattttctccccgcacccacgtgccaagaacgccaccaacaaagccgcagatatcgtgctgcaggctgccattgcggctggcgcaccgaaagacatcatcggctggatcgaccagccaacggttgacctgtccaaccagctgatgcatcacccagacatcaacctgatcctggcaaccggtggcccaggcatggttaaagccgcttacagttctggtaaaccggctatcggcgttggtgccggtaacactccagttgtagtcgatgaaactgccgacatcaaacgcgttgttgcttccatcctgatgtcaaaaaccttcgacagcggtgtgatctgtgcgtctgaacaatccgtgatcgtggtggactccgtatacgatgcagtgcgcgcgcgcttcgcttcccacggcggctacatgctgcagggcaaagagctgaaagccgttcaggacatcatcctgaaaaacggtggcctgaacgccgctatcgttggccagtctgcaccaaaaatcgctgaaatggccggtatcaaagtgcctgccaacaccaaaatcctgatcggtgaagtgaaactggttgacgaatctgagccatttgctcacgaaaaactgtcacctaccctggcgatgtaccgtgccaaagattttgaagacgccgtcagcaaagcagagaaattggtcgccatgggcggtatcggtcacacctcttgcctgtacaccgaccaagataaccagactgcacgtgtagagtattttggcgacaaaatgaaaaccgcacgtattctgatcaacaccccggcttctcaggggggtatcggtgacctgtacaactttaaactcgctccgtcactgacgttgggctgcggttcctggggtggtaactccatctctgaaaacgtcggtccaaaacatttgatcaacaagaaaactgtagcgaagcgagcagaaaacatgttgtggcacaaacttcctaaatcaatctacttccgccgtggctcactgccaatcgcgctggaagaagtggctaccgacggggcaaaacgcgcctttatcgttaccgaccgctacctgttcaataacggctatgcggatcagatcaccaaagttctgaaatcacacggtattgaaactgaagtattctttgaggttgaggctgacccaacgctgagcatcgtacgtaaaggtgccgagcagatgaactccttcaaaccagacgtgatcattgcgctgggtggtggttcaccaatggacgcagcaaaaatcatgtgggtgctgtatgaacatcctgaaacccacttcgaagatctggcactgcgctttatggacatccgtaagcgtatctacaagttcccgaaaatgggcgtgaaagcgaaaatgatcgccgtcaccaccacttcaggtaccggttcagaagtgacaccgtttgcggttgtgaccgatgacgcgaccggccagaaatacccactggctgactatgctctgaccccggacatggcgattgtcgatgccaacctggtgatgaacatgcctaaatccctgtgcgccttcggcggcctggatgcggtcacccacgccctggaagcctacgtttccgtactggccaacgaatattcagacggccaggcgctgcaagcgttgaaactgttgaaagaatatctgccagccagctatcacgaaggggcgaaaaacccggttgctcgtgagcgtgtacacaacgctgctaccatcgccggtatcgcgtttgccaacgccttcctgggtgtttgccactcaatggcccacaaactgggttctgagttccatatcccgcacggtctggctaacgccatgttgatctctaacgttatccgttataacgccaacgacaacccgaccaagcagaccgccttcagccagtatgaccgccctcaggcacgtcgtcgctacgcggaaatcgcagaccacctcggtctgagcgctgccggtgaccgtaccgcacagaagatcgagaaactgctgaaatggttggacgaaatcaaggcagaactgggtattccaacctcgatccgcgaagctggcgtacaggaagccgacttcctggccaaggtcgacaaactgtctgaagatgcgtttgatgaccaatgtaccggtgctaacccacgttatccgctgattgccgaactcaagcaaatcttgatggataccttctacggtcgcgaattcagcgaagcgactgaagaagaggcggtagttgcagcaccggttgcagctaaagcggaaaaaaagtccaagaaataaccgttctctgaatggtcaaaacccgccgaaaggcgggtttttttatgcatgagataaattgcacccaatgagcaccacgctatttggacagcaatcccagctgacctacagggtggcatcaaaaaacgccgcataggccttctgcggcgcttatggcgcaatatcactctggagctttgatcgcttccttatagtgcttgcggcataccgaaacatagctttcgttacctccgatcaccacctgctcccccatatgcatcgccttgccatcatcccccaggcgcagcaccatattggctttacgcccgcaatgacaaatggtcttcaattcgaccagtttatcggcccaagccagcagatgatggctgccaacaaacagttccccaagaaaatccgtgcgcaagccataacacagcaccggaatatccagctggtcgaccacctcgcaaagttcttcaacctgctccttggtcagaaactggctctcatccaccagcacgcaatgcacgggctgctgctggtgctcctgattaatcatggcgtacagttgagtggcgttattgtaaagctgtgcttgcgacgacagcccaatccgcgaactcactttgcccacgccgaagcggtggtcgatctccgcggtaaacaccaacgtacgcataccacgttcttgataattatatgaagattgtaacagcgccgtcgatttccccgcattcatagcggaataataaaaataaagctgagccatgtggccgcgactccaatggtttaaaatatatacccaaagactttccggttgtagcgtagcctccgttgactcatcctctggtcttgctggcgcgctacactgcgcccttgccaatcagggcgaatatattcagccccggttaatgagtctgttgcggttaacaacgctgcggcctgagagacggagggtatatactgtcggaaggtgcaggttgacagtgtagcatagaccgtggccagactcagcaagcgggctgacattatcttggcctaagaaaatagccatcaaccaagtttcatgtgaaacattttacacgcgcaacggacacttttacatctatttacagattactgaggtttatcaagcacaattaattattgttaatgattaactaaattcattaatgctcaagcggatatgtactgtcagcaagcaaacagcctgccttgcccctcccgccagcaatgcaattaaatgtgttttgagcgatgactgcccggttaattggaacgcttaacaacttactcactcctgacaggctgtttaccgttatacccccattctttacagtactagtccttttggggaagtgattatggacacaaatccttcccgatactgttatagagcataattatgccacgtgggccaaaatgactttaagctcggcgattatgccttgcggttggacaatttggcttaaaacccagggggggggggattaaagcctgtttcccctatgttattagtcggacagttctcaatatcggttttttaaagataaatttagtcactctttcaatttggctattgcagaaaagaaaggagcactctattattatcgtcacgcccccccaccaatataatttgagactagaacaatgagcgaagcattgaagattttgaacaacatccgtactctacgtgcacaggcaagagaatgcagcctggaaacactggaagagatgctggagaagctggaagttgttgttaacgaacgccgcgaagaagacagccaggctcaagcagaaattgaagagcgcactcgtaaactgcaacaataccgcgaaatgctgattgcagacggtattgatccaaacgagctgctgcaaactatggctgctaccaaagccgctggtaaagcaaagcgtgctgcacgcccagctaaataccactacaaagacgaaaacggcgaaatgaaaacctggactggccagggccgtactccagccgtgattaaaaaagctatcgaagagcaaggcaagtccctggacgatttcctgctgtaatagcattttagttaccttaaaaaggctccctatgggagcctttttgctttgcagccacggcaatcaccttgaccttcacgcgggtgactagcaaaattctgatttacaggaaaagaaaaaggggccgaagcccctttattttacccgtctatcgttcggttactgaacgttataaaacgcccgataccaatcaacgaaccgtttaaccccttcatcaacgctggtctccggtttaaacgcgatagtctggtaaagctcatcggtatccgcactagtatccaaaacgtcaccaggctgcatcggcagcatatttttgtgcgccgtgatacctagcgctgcctccagagcatgaatatattccattaacttaatagggctactattgccgatattatagacatggtaaggcgcagaactgctggctggagacccttgctccaccgtccaattggcattgggctgaggaacgatggcctgcaagcgcactaccgcctcggtaatatcatcaatgtaagtaaagtcacgatgcatctcaccgtggttatatacatcaatactctcaccggccaatatcgccttggtgaatttaaacagcgccatgtcaggacgcccccaagggccatatacggtgaaaaagcgcaggccggtggttggcagaccatataaatgcgaatagctgtgcgacataagctcattggcttttttcgtcgccgcatacagggatattgggtgatcgaccgagtcatccgtcgaaaacggcagcttgcgattcaggccataaaccgagctggaagacgcgtacaacagatgcccaaccttattatgccgacacccttcaagaatgttcaaatggccaatcaggttggaatcagcataagccaaggggtgatccagcgaataacgcaccccggcctgggcgccgaggtgaatgacccgctcaaactgatgttcagcgaacagctcggcaattccattgcgatcggccaaatccagtttgataaactgaaatgctggctgatttgccagcatgtcgagtcgtgcctgtttcaagctgacagcgtaataatcattcaggttgtcgataccgacaacctgatgccccatggctagcagacgctccgttacgtgataaccaataaaccctgcagcgcctgtaaccaggaatttcatgctcacctcttagatgaccggcttaatcgatgcgccacgaccaataccataatacgtaaagccacgagcttgcagacgttctggatcatacaggttacggccatcaaaaatgacgggctgcttcaaggctgccttaatcgcatcaaaatccggagcacggaaattctgccattcggtacagatcaccaacgcatcggctccctgtaacgccgcttctttggtccccatcagtttcagatcggcacgttgcccatagatacgctgcgcttcggccatggcttccggatcataggcctgcacactggcacctagctcccacagcgtctccatcagtacgcggctggacgcttcacgcatatcgtcggtattaggtttaaacgccaagccccacagcgcaaaggttttgccttttacatcattagcaaaatgatgcttgatgaactgggccagcttatgtttctgctggttgttcacctgctctaccgcctgcaacagcttaggctgataaccgatatgctctgcggtacggatcagcgcctgaacgtctttcgggaaacaagagccgccgtagccgcagcctggataaatgaagtgatagccaatacgcgaatccgaaccgatcccctgacgcactttttcaatgtccgcacccagcatctctgccaaattggagatttcgttcataaagctgattttggtcgccagcatgcagttggcagcatatttggtcagctctgcgctgcggatatccatcagtatcatgcggtcgtgattgcggttgaacggctcatacaactcacgcagtggctcgatgacgtctttgttgtcggtgcccagcacgatgcgctcagggcgcatacaatcggcaacagcggcaccttccttgaggaactccgggttggagacgacatcaaacgccaagtcgctgccacgcttgcgcaacgtttcggtcatcacttcacgaactttatcagcggtacctaccggtacggttgacttatcgatcaccactttacggtctgtcatatgttcggcgatggtgcgtgccacggcggtgacatatttaagatcggcagaaccatcttcgtccggtggcgttcccacagcgataaactggatcgtgccatgatcaacaccggctttcgcatcggtagtgaaatgtaggcgaccagcttcatagttttgctgtaccaacgaagtcaagcccggttcaaagatcggaatattgccttttttgaggttttcgaccttctgttcatcgatgtcgatacacatgacatcatgacccacgtcagccaacacggctgcctgcaccaggccaacatagccaataccgaaaacggttactttcatcgggaagtcctaattttcaaatttaacaaaaagttatcaagctactcctgtttgtctgccaccctaggcagcagccaaaccaacaattctttacccatgtcgggtggtcttttcgtctcgacacgcgatgcgtcaaagagctcacaaacgggcttatcaaccgcaaatggctacaaaggtcctgacgatctatccaagcagctctattttcgctctcaaattgcgtacttactccgccatacgaaaaacctgcaaagtataccagcttaaatccgctgagtattaccccaagttcaaatagcaataaattaagacaactacctatggaaacgacggtgatggaataggcagagacaattgcggaagtttctattgatgatttattcagcacttagcatcagacgtaaccggccgccgctgccccacacctggcactgccaggcatcacaacgttggctaatttgattcatgtaagtggtgccaagcgttcccaagggtacgccattacttaattgaatcaggttatcccctgtatttacattggcatgcaaaccggcagaggccagcaccagattcttatattcggcatgatagtagcccaccaacagcggaaattggccttccaacttgccttggcgcaataattggttaacttgttttaacaatgcagacatttgcggcaggcgatgctgttgattggctaaatgatcttgtaataaaccgttgaataacgcacgcaataacaaggcagccatcacgccattatctcctgcacgggtgacatccaggcaataaaacgccagatctttatccgacaatgcagcgatatccagcaccaaacccggattatcgctggtggttaattgccgataattaatacggcaaccggcaatagactgctgcacggggggttgtaactgcttgagtaatctcacggcctcggagggattttgacttaatgcctgccaatcctggaacaggtcggcctcttcgattgcctgcgaagtgaacatgttagggtagaggcaagccagcaccgcttcgcgcagccgattgaggtcactcaacggcttcagcaacacatcctgtacgccgagccgcaacaccttggcgatatccgccatcttatcggtcgccgagatcaccaataccgggatctttatcccttgcaaacgcagatgctcaacaaactcgatgccgtccatttccggcatggcgagatcgcacaagatcagatcgggagaaaactcctcaaccgcactcaacgccacaaggccattggccgcctcgctggtttgcgctcccaaggaagcaagataacctacaagcacagaacggaaaacctgctcgtcctcaacgattaagatgcgcttgtttatcagtggtaatgccatcgacccagcctcttcccttttgatgttgtaatagtggctcataatgagcacttgtgcttgtcgaaaacacgcccgatagcatcattccaccctaacagatggtaatcatttattttttatcaatggtgccaaaacatctatctgtttttctaccgccaagcggcctgcttctattgcctcgctggcgcgatggaaatccagggtggatatttgtgggcaatacggctggatcaacacgtccggcgggtcactggccatacggcttcgcttcactcgattctccagcatctgaatcgaggcgctcatgatttccatcgccgtgggggtgaaggtggttttcttcagcatcattttgttcatgcgttcccgcaggcggtcgcgccagttattggcatcgacaatgcttgtttcaccctgatcgctagcgtcattacgtatcgaaaacagatcctgctgcatcaggtgcgcatcatgctgcaaatccacggcaatcactatgtctgcccccatcgccctggccaatgagataggaaccgggttgaccaaggcaccatccaccaaccaatacccgtcaaaccagaccggtgccaacaagcccggcatgctgcaggaagcacgaacagcctggtggatatcccctttggtcatccacagctcacggccggtactgaggttggtggtcaccgccccgaatttcagtgagcagtcggtaaagtcgttaattttcagtatttggccaacgacgttaaatacgcgttcgccgcgtaataatccaccgcgctgccaggagagatccatcagcctgatcacgtcccagtaactgaatgatcgtacccatttctccatcgctggcaaccgatggctggcaaacgcagccccaaccagtgctcccacggaacatcctgcaacaatatctgcttcgatacccagcttacgcaatgcgttaatcacgccgatatgcgcccatcccttggcggcaccggcccctaatgccaacccgattttaactttccgcatgcttcgcctatcctttgcacagtgaattcactcagcccaatcgcagggtacattgtcatcaacgaataatgttaggtaacatatgctttaaattcattttagctgcggctttacatcacgctagctaaccactgagaggcgttattttgactgagctatgcccctgcggcagcgggcaggactacagcgcttgctgtgcaccctatataacaggtactcaatacgctatgtcgccgggcatattaatgcgttcgagatattccgcctatgtaaaacgggatgtggattatcttattgcgacctggcacccagactgcaatcccgaagagtggcgcagcgccatcagcagcagctttggcaataccgaatggcttgggctgacggtggtagcggaaaccgccggcaatagcgtcgatgaggggttcgtggaattcatcgcccgatcgcgcgatggagactgcgagagtgccatgcacgagcgttcccgcttccttcgccttgaacaacgctggtactatatcgacggaaccaaacctcaaccgggcagaaatgccgtttgcccctgcggttcaggcaaaaaatataaaaagtgctgcgggcaataagcctgcgggttcagaatcagacggaatcgacacactcatgccacagcaaaacgtacaaagaaaaattttacgcaccatctgccccgatgccaaagggctgatcgccaagatcaccaacatttgttacaagcacgaattgaacattgtgcagaacaatgagtttgtcgatcacctcaccggtcgtttctttatgcgtaccgagctggaagggatcttcaatgatacgacgctgttggccgatctggacggcgcgttaccagaaggttcagagcgtgaactgcacagtgcaggccgccgccgtatcgtggtgctggtcaccaaagaagcccactgcctgggcgatctgctgatgaaaagcgcctatggcggcctggacgttgagattgccgccgtgattggcaaccacaccacgttgcagacgctggttgaacgctttgacattccgttccatttggtcagccacgaaggactgacgcgtgaacagcatgatcaacagatgatcgcacagatcgaccaataccaaccggattacgtggtattggccaaatatatgcgcgtgctcaccccggctttcgttcagcattacccgaaccaggtgatcaatattcaccattcgttcctgccagcctttatcggtgcgcgcccttatcatcaggcttatgagcgtggcgtgaagatcatcggggcaacggcgcactacgtgaacgacagcctggatgaaggcccaatcattatgcaggacgttattcatgtcgatcacacctattcggctgaagatatgatgcgtgccgggcgtgacgtggagaaaaacgtacttagccgcgcactgtatcgcgtgctggcgcaacgcgtgttcgtctacggtaaccgcacggtgatcctgtaattggttaacaaagcggtgtctttcgttcacggaagcaccgctgagaataaaaaagcgacaaacaattcattttctgcatttcaatgctttacacaagcgtttcatttgatatgatgcgccccgcttaccgagacagacgttccgcaagcgattatgtcgtaccgagggatctagccgattcccagtaacaagtagtgaaccatgagcatcatggtggggttcccgagcggccnnnnnnnnnnnnnnnnnnnnnnnnnnnnnnnnnnnnnnnnnntctcctagagcactgaaatgaaatgttgttcagagtttcatttagcactgaagggaaggatgagaagcttcgagcaaggttcgagtccacacagtggacaacgcgcttgcgcgg

SEQ ID NO: 325 - DNA, 486 bp, unknown
  Altogen  635822 strain
ccctggtagtccacgctgtaaacgatgtcgacttggaggttgtgcccttgaggcgtggcttccggagctaacgcgttaagtcgaccgcctggggagtacggccgcaagattaaaactcaaatgaattgacgggggcccgcacaagcggtggagcatgtggtttaattcgatgcaacgcgaagaaccttacctactcttgacatccacagaactttccagagatggattggtgccttcgggaactgtgagacaggtgctgcatggctgtcgtcagctcgtgttgtgaaatgttgggttaagtcccgcgacgagcgcaacccttatcctttgttgccggcgcgtcatggcgggaactcaaaggagactgccggtgataaaccggaggaaggtggggatgacgtcaagtcatcatggcccttacgagtagggctacacacgtgctacaatggcatatacaaagagaagcgaactcgcgagagcaagcgg

SEQ ID NO: 326 - DNA, 319 bp, unknown
  Altogen  635822 strain
  misc_feature (184)..(292): n is a, c, g, or t
tctattctattcagtatcaataagcagttttcgaagggggagtcgtcccccttcttatcttccgttgggtcaggggttttttatgaaactttttcctctcaatattgcgcgtcaggttggcacttttgcagcgattgccctattcagcagcagcagcctcgccagcgtggtactcagcggcacnnnnnnnnnnnnnnnnnnnnnnnnnnnnnnnnnnnnnnnnnnnnnnnnnnnnnnnnnnnnnnnnnnnnnnnnnnnnnnnnnnnnnnnnnnnnnnnnnnnnnnnnnnnnncgccaaagaagtcagcgtcaaaatcaa

SEQ ID NO: 327 - DNA, 12244 bp, unknown
  Altogen  635822 strain
  misc_feature (6795)..(6795): n is a, c, g, or t
  misc_feature (9176)..(9239): n is a, c, g, or t
  misc_feature (10104)..(10115): n is a, c, g, or t
  misc_feature (11921)..(12011): n is a, c, g, or t
ctttaaacatacaaggggaccgaccgtgctagatcttagctacggcattcatcctcaacatcaccttgttacagattaacgtccacacctgggtacggtgcaatggcgaacgccgaactggggccaaataacgggcttcattgcttaatcatatagccaaaaatccgtttccagccgtgatctttcttctcgatatacacgccctgcagctccggtgagaagccaggtaagcggttgatgccctcctccagtgccaggaagtaacgctgtaccgcaccgccccacacttcgcctggcaccacgcacaacacgcccggtggataaggtaaggcaccttccgccgcgatgcgccctgctgcctgggcgatcggcaccagctcaacgttgtcacggataaactcgacgttggcatcctgcggattcatcatcaccggcgggaaatgatcctgacggaacatctctttttgcaactgcttcacgtcgaagctgacgtacaaatcgtgcatctcctggcaaagttgacgaagggtgtagcctgcataacgctgctgattcttgcgataaaccgtcggcaagacctcactcagtggcgcatctgcctcgacgtatcgctcgaactgcaccagcatatccaccagatgatccattttcgccgggttctccgccggggtgagcaggaacaggatcgagttgagatcgcacttctccggcacgatgccgttctcacgcaggaagttggccagaatggtggccgggataccgaactcggtgtactggccggtggccgcatcaatccccggcgtggtcagcagcaacttgcaaggatcgaccagatactgcccctgcgcataaccggcaaagccgtgccattgctcgcccggtacaaagttaaagaagcgtgcatcgttggcaatcaagtcggtatcgtagtcctgccagtccttgcctgccacctgcggcggaacaaagggccgcagttgcgagcaacgtgccagtagctgtttacgcgtgtcgatccccagcttgacgcactccatccacatgcggcggccagcggcaccggcatgcatcttggcgttgacgtccagcgcggcaaacagcggataaaacgggctggttgaggcatgcagcataaacgcattgttgagatgcttatggttgcagtggcgcttctggcctttaatgtgatcgtctttcttgtggatctgcgaagtctgcgagaacccggcctgctgcttatgcaccgattgcgtgacgaaaatacccggatcgtgctcatccaattccagcagcaacggcgagcactccttcagcatcgggataaagccttcataccccacccaggccgaatcaaacaggatgtaatcgcacagatggccgatggtgtcgatcacctgacgggcgttgtaaatggtaccgtcataggtgccgagctggatgatcgccaggcggaaaggccgtgtcgcagcggccttttccggggctacatggcggatttgctcgcgcaggtaagcttcatcaaagcattgggaatcgatgccgccgataaaaccaaacgggttacgcgcggtttcgagatacaccggcgtcgccccagcctggatcaacgcgccgtggtgattggatttatggttattgcgatcgaacagcaccagatcgccacgcgtcagcagcgcgttggtcaccactttattggatgccgaagtgccgttcagcacgaagtaggttttatcggcgttgaacactttcgccgcatgtttttgcgcatccttggccgagccttcgtggatcagcagatcgcccagcttcacatcggcgttgcacatgtccgaacggaaaatcgtttcgccgtaaaactcgaaaaacttgcgccctgccgggtgtttgcggaaaaactcgccgccctgatggcccgggcaggcaaaggttgagttctccatttccacgtaggttttcagcgttttgaagaacggcggtaacagcgcctgctcgtaggcatcggcggcggcctccaactgcgccatgtaaaacgctttggtcgctgcagccaaggcaaatacgccagtaatcaacggtaggtgatccggggaaagctgttcatccccctcaacggcaacaaacgtcgggatctcaaagccggtcgctttaagcgttgccagaataccggcatccacatcgctaacggagaccacggccgccgccacatcggtatagtcagtctgccccacgcgcacaatttcgcgcagggtttcaatgctggctaccaggctggcgctggttgctatcttcaattctttcatcatgctgagtctcaaacggttaaggatgagggtgtgccactgggcacataatgagataaccctggttatcccggcaaagtgatgagccaaggcgcaaccatgaccggccgatgcgggtaggcatcagacaactatcggggactgggatcggcagcgtccgatagacatcagtaaaatcagagccgcagctctatttttaatcatgcctaacagcgagcattggctagctttaccgcataaggggcagcggtgttcgcataaatggcgttaaggataaatggagtgatggcatcatcagacgtctggagcgcagctgcgctgaggtggttaaacccgtcatgcctgtactcctctgtgatgaagtggggaattcgcgcaatgattacacgtttttttcgagggttcaagccggttaatagttactattaatgcataattatttattgataccgtgtgggtttccccacacggccaggcaggttttgattagaagaggttgaacttgtaatccacctgcagttcgatcgagtggttctgagcgcgcatcggcttgccatccgaggtcagcttcggctggttgctctggctctggtagttccaggatgggccaccggatagctgcactgccaggtttttcagtgcaggctgtgacggtgtccagcgggagtaaaccagggtttcaccacgctcaatgctatggcctcggtacttcatcccccagccatagttggtgaccatccccagctcaacctctggcgtaacggcatagccgaaggtccaggccagcatcttttccttatcgcccacatagtcgttaccccaactgtcggccattgagttaaaggtgccgcggctgtgcttggccaggtgccactcaaagcgccctaacccgttgccattatcgagtgaggcacgggtgtatgaagccccaaccttgtgcttccaacgctcggcgcgccattcggcgtacatcgcataatggtaggcatcgtcatcgaacgtcttgtgacgggtggacatgcgggtccagtcttgcagaccatggttgtaatacacctggctggcaaacttgaggcgattttccgcccaggacgccggttgccaccccagttccaccccgtggcgttgcatatagttatggctttcacccaggaaatagagtgcgctatagccgtgatcgctatagctcaattcacccgtcgcaatgctgctgatctcctttttatccgcagtgaggaaatggatcttatccggagaatccctgtcgctataacgggtcacataagcacctcgtacccgtactggcccggtagccgcttcaccacgcaatcccagataggtacttggaatagcgcgcgtggagttgttaagtgcgccccattttttaatctgctgccaaccggaataaaggtgcagataggtgtcatcatcacccaaacgccctttcaggtagagctgacccatcttgttgaaacctttcgcctggccgttgtcgttatacaacacgctacggccccagaaatcatcgctggcggccagcttaatcacgccataataagaagcatctactcccaatatatctgcaaaatagccggactgataatcaagcgtgatcccctgcccccaggccgtttggatggagcgttccccataatcctcggtgcttaaatttttaaacacgttacggaaagaaagatctgcgtgactatcattaataaaacttgagaagagatgatcgcttacctttatttcctctgcgctgaggggtaaagagaacatcagtgcaaacaatgcaagaggcttttttattttaaatttattgatttgatacatagaaaaatcccgttttctatctactcacccagaactattttaattaaatgatttctagataatgttggaaatgtttcaccccgcaaccagggtgaaacacggctaatattattattctgtaataatggtatggatcagttttggtgcttgcgccttatcggcaagggtgatgctgtcatagattttcgccatgacgttcgccacatccgggcggttggcatggatcgtcaccagtgagtcaccgatggcgacccgatcgccgacttttttatgcatcatcaggcccacggccagatcgatgtcatcttccttggtggcacgaccggcaccgagcaacatggctgccacgccgatttcatcggccacaatattggctaccacacccgcctgcttggccggaacctcaatcaggtatttagcctgcggcagcttctctggatgatccaccattgaagcatcgccgccctggttggccaggaagtcacggaacttggccaacgccttgccgttatcaatcacctcttgcagcatggcgcgcgcagccggtaacgaatcggccttcttcgccagcacgaccatttggctacccaactgcatgaccagttcggtcagatcttccggaccttcgccacgcagcgtatcgatggcttccttcacttccagcgcattaccgatggcgtagcccaagggctgcgacatatcggagatcaccgccatggtattacggcccacgtggttaccaatgcgcaccatcgccgtggccaactcgacggcatcttcagtggttttcataaacgcaccggcaccggttttcacgtccaacacgatggcatcggcacccgccgcaatcttcttgctcatgatcgaaccggcgatcagcggaatggagttcaccgtaccggtcacatcacgcagcgcatacagcttcttatccgccggggtcaggttaccggtctgaccaatcactgccaccttgtcgcggttcaccagctcgataaactgtttgctggagatttccacatggaaaccggccaccgcttccagcttatcgatagtgccaccggtatgccccaggccacggccagacatcttcgccaccgggatatccagcgccgctaccagcggtgccagcaccagcgtggtggtatcacccacgccgccggtggagtgcttgtctaccttgacgccttcgatcgccgagagatcgattacgtcaccggagttcaccatcgacatcgtcagatcggcacgctcacggtcgttcatatcctgaaagaagatcgccatcgccagcgcactggcctggtaatccggaatatctccccgggtgtagccgttaacaaaaaactcgatctcttgcgtagtcagctcttttccatcgcgctttttggcgatgatatcaaccattctcattgtcattccccggatctttatttctgtaagtcgatcttgtaaacggcaaagccgatatcgtcttttcctaccaacgccattggatgctgtgcggactgtttgatgtaatcagccgcattctggcttggtgaggtctcgatgcggatatccaacggcttatccgcagtaatttgcgcgatccgccagttgttttttacctctggcttatatgcgccatgctgtttggtctgctcggagatgtagttggccacgatagtgcgcacttcatccggcgaggagataacgatatttttttcacccgtgccggcgaatttgccggtaaatgcccggtaattgttcacggcaaccaggaatggcgcgtctgctaccaccggtttacctttataggtcagcgacttgatacgctgggcctgtggattgatcacgttgcaatccacgtcataacgcgcaggctgggtcacgtcgatctgatagctcagatcgtcaaacatatcgaagttgtaggcccggaaaccgttccagttgagcagtgactgtggcttatcgcttttcacgtcgatctggttgtacatgcccgcagagcactccaaccactctttcagatcgctgcctttcactttcactgccgccagcgtgttggaatactggtaaagatcggccgcgttacggaagctcagaggccctttacgcatatcaacgaaggccgccgggtcattcttcctgccacccgccttgaacggtgccgcagcagaaagaactgggatatcagccagatccggatcgccctgaataaagtgttcaacgtaggctttctgcgccgcacggatgatctggatggccgaggagtcctgcactaatgacagataggtattggtgtcttcggcaatggtgccaatcggcttgttaacaaattcacgggtgtcgttatgtgcctgctccagcgttttcaccagcgtagccttggcctcgaccagcgatttgtcattcttcttatcaaaaattgggcgggcttctgcacggctggagaccaccttccacttattggtttccccttccagcaccaggtcgatcacccccaggttatccgcccagtggcccggcatgactgcgggtacgccattaaccgtacccttttcaagatctaccccaggaatagcggcgaaatccttgcttgggaaaataccgtgagagtggccaaaggtaatggcatcgatgcctggaaccggcgtgaggtagtagaccgagtttncgtgaggtagtagaccgagttttctgccagcgccttgtaaggatcggcagagatgccggagtgggcgatagcaatcacgatatccgccccttctttacgcatctgtggcaccagttccctggcagtttcggtaatatctttggcgaccaccttgcccgacagcttgtccttgtcccacagcacaatctgtggcggtacgaagccgatataaccgatgcgcagcttatgctctttaccctcggtatcttttaccggcgtgtccacgatcaggtactgtttgaaataaggcttgttggtcttggcgtcatagacgttggcgttgatgtacgggaatttggccccgctaatcgccattttcaggtaatccagcccgtagttgaactcgtggttgcccaggctgccgactgcataatcgagggtgttcatcgcctgataaaccggatgcacatcgcccttcttcaggttggcagcggcatagtccgccatcgggctaccctggatgatatcgccgttatcgaccagcacgctgttggtcgcttctgcgcgggcagcatcaatcaaggtggccgctctcaccaaaccgtactgagcggtggctttatctttgtaatagtcataatccatcatgttgccgtgaacgtcggtggtttccatgatacggagatccaccgttgcggcatgcgcagcgcctgtaaccaacagggccaataacgatagcttgaggggagaagtcattttcatcacatattccttattgttatagcggtagcaggccacaacctcttgatgtggccttgagctaattaaaagaagaaacctacgacggcggcgttcaggaagctgaccagcgtggagccgtaaagcagcttcaggccaaagcgggctgcgacattaccttgcttggagtccaacgccttgatggcaccgacgataatgccgatagaggagaagttggcgaacgacaccaggaacaccgagataatcgccatggtacgttcagagaagttgtaatcaccctgtgacaggttgagcatggcaacaaattcgttgctgacgatcttggttgccatcaggccaccggcctgcaccgcttcgtgccacggcacccccaccaggaaagccagtggtgagaacacataacccaataccccttggaaggaaatgccaaatgcagcggtgaatagcgcgttagccatggtgatcagcgcaataaagccgatcagcatcgcaccaacgataatcgctaccttgaagccatcgaggatgtattcgctcaggacttcgaagaagctctgcttctccccttcaacgacatccagaatgtcttcctcaggcttgacctgataagggttgatcagcgacgccatgataaagccaccaaacaggttcagcaccaaggcagtcaccacgtagcgcggatcaagcatcaccatgtaagcgcccacaatcgccatggagaccgtcgacatggcagaggtacacaacgtatacaggcgatgctccggcagcaggccgagctgttttttcaccgagatgaacacttcagactgaccgaggatcgccgaagccaccgcgttataggactctaagcgccccatgccgttgaccttgctcagcgccaggccgatgtacttgatgataaagcccaggatgcgccagtgctgcaggataccgatcagcgcggagataaatacgatgggcagcaaaacggacaggaagaaagagatctcgccgtgattcaccaaaccaccaaagacgaagttaaccccttcgttggcataggagagcaaattgccaaataccccggcgatcacgccaatcactttattgcctacgtcggtcttaagcagcagtgcggtcatcaaaaactggcaggccagcatgacgaaaatcggacgatagcgaatgtttttgcgatcgttgctcactaaaagcgccaaaatacagatagtaacaatacacactatccctatgatatatttcatcttttccccaaaattatctgtgaacttttacgttccgttgccgagccttgtaccctgacgtttgccgggaactaatgatgttattatcgaaacataacacagacaatatgttattaaagttacaccgatcacatttaaaaatgacaatagccttaaaatacatacatgtaacatgttgtacttattactaacattaacttgattagagaataggcaggggtaaacattgttggggtgagtttttcgatctctggtgtcgggcgttttgggggagaagggagaatgctggcgcaggaaggtagccctgtccttgcttgaaattagagcaatcgctcggctttgtgacagaaacccattgacgacacagggccaaatacggtttaatgcgccccgttnnnnnnnnnnnnnnnnnnnnnnnnnnnnnnnnnnnnnnnnnnnnnnnnnnnnnnnnnnnnnnnnaattcatatcaacggacctccacggaggtccgtttttgtttgtataccccgccagaatcagcacttccttcatactttcattcaaccagactccacctaacttacccggtatcaagtcccttgtgcgggtacaatcgagggtatagtctgattcgataatgtttatacccttccccctccatcaggagacctgtctatggcactcactgacgcaaaaatccgtgcagctaaaccgcaagataagccctataagcttgcagacagcggtaatatgtttttgctcgttcaccccaacggctccagatactggcggctccgttatcgatttctgggtaaagaaaaaacactggcacttggcgtataccctgacgtgtcattatctgaggcacgagataaacgtgatgtagccagaaaattgatagcggatggcattgacccatgcgaacaaaagcgggttaagaaatcagtacctgagactgcatcaaccttcgaagcggtgacgctacaatggcacaagagcaacaaaaaatggtctgagtcgcacagcgctaaaattctgaagagtttcgagtcccacgtgttcccctatattggatcacgggatattaccacgcttaaaacgccagacctgctgatcccggtcaaagccgctgaagcgaaagagatctacgaaatcgccgcccgattgcaacaacgtatctctgccgttatgcgatatgcagcacaatccgggatcattgattacaaccctgcagtagatatggctggcgcactgaccacggttaaacgtcagcaccgccctgccctgacacttaaccgtacacctgagctattggctcccctgggtggggacaaaggacagccnnnnnnnnnnnngtctggatgggtacaaaggacagcctctgacacggctggcaaccacgctcactcttctgatctttatacgctccagcgaattgcgttttgcccgctggtcagagatcgactttgaaaaatctatgtggacaatcccaccagagcgcaaaccgattgcaggtgtcaaattttcgtaccgtggttcaaaaatgggcactgagcacctggtgcctctatcacgccaggtgctggagcttctgcaacagatacacgctataagcgggggatacgagttgatcttcactggcgatcacaatccctggaagcccatgagtgaaaataccgtgaataacgcactacgacttatgggatacgatacgaaagtggatgtctgcggccatggatttagagcgatggcgtgtagttctctgattgagtctggcttatggtcgagggatgcagtagagcgccagatgagtcaccaggaacgtaacggcgttcgtgcagcctacatccacaaggccgaacacctggacgaacgcaggctgatgctgcagtggtgggcagattatctggatgctaacagggaaaagccggtgagtccgtttgactttgccaagcttgggcggtgattgtccatggtttccgctgcgtgatgagtagcatcaggctttaacattgcctagattgagctccagttggcgcatgtggacaagaacagcatccgtggcacctataaccatgcccagtatcttgatggtcggcgggagatgatgcagtggtatgctgattacctggataaactctaaaaaacataatgctcagccccttgacgggctgagctttacctttgcctttcttttttggtgtatcgccatggggatggattgttttagggtccctgataactggccgcaactcagtaaaccttagctgataaacactctcactgtcgctcaggcttctttgccaccatgcggttaactctctccgccaactgagaaagcgacatcaaacgactgctaaccacacggtttttaccctcgcgcttggcctcatacagcgcttgatccgtcagctctatcgctttccctaccgacatgccagccagatagagcgacgtcccaatagagattgtcatccgtatcacatccccattctcggtaataaaatcagattcttccacctgagtgcgaatgcgttccgccatggccacaatatgctgcggttcataactggaagtaatgacaataaactcctcaccaccgtagcgcccgacaaagtcctcatcacgaacacagtccagcagaatggcccccacactggccaacacgccgtcaccggccaaatgaccataagtgtcattcacctgtttgaagttgtccaaatccagtagcatcaggccacaagattgccgctcagcatgttgcagcatcattctgtaatccacgctggcgcggttgttgatgcgggtcaggctgtcggttgtcgccttgttgcgcatggagaagaaggcatgaatatggcgttgtttaaagctcagggcatgatagcaaatcgccagacagagtgcggaagcgacctgatacagcagaatatccagccacacctcacgaaagttgacgaacgaaccggccacaacaatgcggtagagcgcaataataccgatggtgaggtaaaatacgcgattcgtttttttccgccataccccagataacagcagcggcaagatgatcgaaccaataaacagattatccagcgtaaagccaccgttaaatccaaagttcaccagataacacaccgccccactgactgcaccaccgaaannnnnnnnnnnnnnnnnnnnnnnnnnnnnnnnnnnnnnnnnnnnnnnnnnnnnnnnnnnnnnnnnnnnnnnnnnnnnnnnnnnnnnnnnnntatcaccaggatcatcgggatcatggcgaaactgtaataaatgtttccagcgagcaacagccgatcctggttcagatacagtaccgccagccccgaaagtacaccaaacagcccccttttccacaacgccgactcatatgaaaaagggacgttttggctaagcgcaaagtaagcgaccgacagcgtggcataagtgatacacgcgtcactgggctttgttgaataaatcagat

SEQ ID NO: 328 - DNA, 458 bp, unknown
  Altogen  635822 strain
  misc_feature (132)..(223): n is a, c, g, or t
  misc_feature (288)..(388): n is a, c, g, or t
acgtgggatgcggcaaacagccgatttattatcacgtcaaaatctacaggtgcgacgtcagccgtcggctatggttcggcgaataccaccggtaccgacatttccgccatgatgaaagcggggcagaatgcnnnnnnnnnnnnnnnnnnnnnnnnnnnnnnnnnnnnnnnnnnnnnnnnnnnnnnnnnnnnnnnnnnnnnnnnnnnnnnnnnnnnnnnnnnnnctgatgatgatgtcgtgagtattgcggcgtttatccagtcggatgatatttcccgcatcttcggnnnnnnnnnnnnnnnnnnnnnnnnnnnnnnnnnnnnnnnnnnnnnnnnnnnnnnnnnnnnnnnnnnnnnnnnnnnnnnnnnnnnnnnnnnnnnnnnnnnnnacgccaccgcttcaatctttggccgggccttcaccgtcaacttcctaggcaacaacaccacgatcaccct

SEQ ID NO: 329 - DNA, 2728 bp, unknown
  Altogen  635822 strain
  misc_feature (210)..(324): n is a, c, g, or t
  misc_feature (2586)..(2677): n is a, c, g, or t
gtggtggtaacggatttcaccggcgaccttgatttgctactggtgccggtgggggcgtggctgcgagaaaatcagcccgacatcatgaccaccgacgagggtaaaaagcaggggtttacctacatcgccgacatcaacaataacgacagtgttgacgtcagtatcagcctgcgcctgactgagcgcacgattgtcaaagaggttgaccgnnnnnnnnnnnnnnnnnnnnnnnnnnnnnnnnnnnnnnnnnnnnnnnnnnnnnnnnnnnnnnnnnnnnnnnnnnnnnnnnnnnnnnnnnnnnnnnnnnnnnnnnnnnnnnnnnnnttgattgccagtctgtcaccggccagtcgacgcaagatggccgccgagattgccaagcagctccgcgccaatcagcagcagcgcatcaagcgtcagcaggcacccgacggcaccccgtatgccagtcgccgccgccagccggtgcgtggtaaaaaaggccgggttaagcgggccatgttcgccaagctgcgcacccatcgctacatgaaagccaagggcagtaatgacgacgcggtggtcgagtttgtcgggcgcgtgcagcgtatggcgcgcgtgcatcaggacggcttgaaagaccgaccaacgcgttatagcaaagaagtgcgctatgacgtgcgcgagttgcttgggttcagcgaggctgaccggaaaatcgtcgaggagacctgtttgattttttttaataaatgagatattttttagtgggttattacacggacttggacttggcagatattttgaaggagttattgtggagatatcatttgcattttggaactgcgcgatctctcctcccggcatttctgattcaccccaggcacaattggttgatgatgcagtaagcgttattaaaaacctcctggtggataaaaatgtttcttttgtcgctctttgtgaagtaaatgaggagtcatttgctcttttaaatgaaggactttctgatgagcggtttgaatcggttctgttgaacgataaaacaaaaacaggtagcagatttgatatatgtctcttttatagtgctcaggatgtgagcatctcagaaggtgtttcacatacgggtatggttgggacttcgagtataaaaatagctcaacaacttgagattgaggttaaaaataataaaacaaaagtgaatttcttgatttcgcattggccaagcagacttcagtatgtatctgactcatttagaaatgagtgttcaattggtttgaggaattttgtttatggtctgataaatgatgacctacaggttatattgatgggggattataatgatgatccgtactcagcaggcctttttaaaaacctaaaggcgacaaatgatagagccttagttttatcatcaacaaaaggatggctttataatcctttttggcgggagctaatcgcgcgcgagtatttctctcaagatagtaaagatcatgattttggaacttgctatagtaaggctaacaatagaaatcgttggtcgacctttgatcagattattttctcaggaaattttctacaaggaggtccttggttcttgaaagagtcaaagacaggggtcgtcacagacaattcgctgattaatatggtaatgagtgataagcataaatttgatcacttacctgtttttggatgcatagagtatctggaggagaaaaatgttcaactttaagaattcaattaaaataggaaaagagtccgctgcatctgttcttgaaaacatgaaggcggttgataatgtttttgatgcgttaaataaagaactggcggaagagtctaataataagctctctgttattaggataattccatttgattattcaaacgccgagaaaaaagctctcactattgataaaaaaggttctttagatattaatgttgacgggcagataaaaaccattggctactgggaacaggataaaaatggctttccatttacattgattttttctggggagcgaacagattgctgggatatagagtctttggtggctgctttaagtgatgttatttcatctgggcaattttggttgtcagttgaggagctaaaaaacaagggaagcaagaacccgctctgaagctttaactgtcggcttaagcacctcttcgggtggtcattctttgctacgtttttgcagttgtcctatctgtggcccatcgcttgaatgatgctctgtctcaataggcaaggcatcatttgatgtatgaatattccaactcaattatcagaagtccttagggctgtacgcaacctcatccgcatcggcatcattgttgatgtcgatatcgatgaggggcgctgccgcatccaaaccggcggcaatactaccgactggctgaactggcttacctgccgcgctgggcgctcgcgcacctggtgggcaccgtccattggcgagcaggtgctggtgttggccctgggtggcgagctggatactgcctttgtgctgccgggcatttattccgatgacttcccaccgccatcaacctccgccgatgcattccatattagctttcccgatggcgcgatcattgagtacgagccggaaaccnnnnnnnnnnnnnnnnnnnnnnnnnnnnnnnnnnnnnnnnnnnnnnnnnnnnnnnnnnnnnnnnnnnnnnnnnnnnnnnnnnnnnnnnnnnntaacacaccggaggtggtctgcaccaataagctgaccaccggcacgctgga

SEQ ID NO: 330 - DNA, 4749 bp, unknown
  Altogen  635822 strain
  misc_feature (223)..(340): n is a, c, g, or t
  misc_feature (371)..(407): n is a, c, g, or t
ccggccgatggcgacgatagtaggctctgcacgggtgaacagcccgaaggttagaacctattggtaccagaatgactatctaggcacgccgcacagcctgacggacagccagggcaacaccgtatggcgggggcagtacagcgcatacgggcaactgacggaggaatggacgccaccggatgatccgtatgaacatccacaaccgaaggtgaacaacccactnnnnnnnnnnnnnnnnnnnnnnnnnnnnnnnnnnnnnnnnnnnnnnnnnnnnnnnnnnnnnnnnnnnnnnnnnnnnnnnnnnnnnnnnnnnnnnnnnnnnnnnnnnnnnnnnnnnnnncgatacagaaagcgggctgtattacaacctnnnnnnnnnnnnnnnnnnnnnnnnnnnnnnnnnnnnnggcggacccggtaaaactagccggagggttgaatccttatcagtatgttgatgggaacccggttggttgggtggatccactagggctgtttaaaactgatgtaacaggtgcggagaggagttcggttaatacaggaactccgaaacttcctgaaattccgtggtcaaactcaacagttaaaagagcatcagatcaactagatcgcggggcaagagacgtctatgttaatagccgtgctgatgctgaagagctatttcggggcaaatatgtaggcgaaggctataggaacgctgagaacttcaactcagtaacggctaaggattattttgaagttaaccgttcaaataaggaaccatattatcattgggatgatgtgcctgtttcagacatctcaacaaggaaagtatatatggttaaccatgaagttaatagcttgcatggagaaatgccacatttacaattgcatcctgttggggaaaaagccataagaatatattgacctaataagatggagagtaaaaaatgagtgtaaatctaggcatacctgctaaggtgtggaatggaattgagtttagcaactatgataagatagcccaggagatttcttccaaatcaaatgacatgaggcgttgggttgctttgtatgctttatttaatattccagaaaaaaccaaaatcagtccgcatgcatatgattttttaaggagttcaaaagactttaaatattgcgtagttgattttgaaataccaaaaaatttgattgaatttaatgacgggcttgattctgataatgcaatcaacctgaaatgtttaacagcaaacaccgaagaagaactagattcaatttttaaacaggaagggataaacccagcgctatttgttcccccttggcgttgtgattatccgatttaacttatgaccccgaccttaaaattgaggtcgggaataccccactaatccccgaacagaagaagtaaaaatctcatgatgtgaacttgagaaaaagttatcttcaaggtaatttaaatcatggcaaagaaatgtatcatcatcacagatgaagatattattaataatcttaattctgacaaacttactgttgagaattactttattaagaagttttcaaccgaatattacactatgtgcgcatcacttcaaggtgagcatttttatttttttgagaggatgagaaatttagatgtgcagttgtagacgtcttgaaacggcgaggggccactattatttcttgggataaatatactaacaaatttagatagtttaattattcagggtgagattcccgttaattaaattttaagcccccctgccaatgaggatatagcattgatttataaatttatcctaagcctgtagagcttaagaggagctagaccttatgcttataccaatggtaatcatgttattaatgttgcatcattggaattattttaattagacaatgaatgggtttaaaaatacacatgtcattctagaaaaacagagtgtttagcttatatggcgtagtcggcccaagtaagtcatgaaatattcagaacataggagtttttaataatactcttggtatagagaaaaacactttaaacatcaggtgaaaaagtatcagagtatgcgaaaaaaccgttttcggttttggagacaaattgcatgtcatattaatgcaagggaaacaatatggatatctatgtggatttatttttaccgaagggtaatgatgtttgtcatttaaaagaagatctaatatcatggggggaggagagtttttcccaatcaccaaaaaaatattcttggatggatgcactgaaattcgcctcccccgaatattctccattatacgaaattttatcacctcaaaatgtagagctggataattactcaatatattcaattgacgataattcgatatatgagtgggagcaggatattaataaacatcaagtatctaataaccatttaaaaaaattcattaccgatgagttacctaatgtagactcatggatagttgctatttcatttgatgaagacattattgacaacataaagaaagtgattttcatcaataatgttaacgaactaatagaagagatagagaaagcaatgaactggaatgataccaatggtttcattgcttataaaatataatttaattttatagctcatcctttaataaataattaggatctaccatgggatgaactgctgtattaagagtatatgatagaacgaaggtgaggggttattcagcttccagaaggtaaaactggtttgcaggatataccccctcctattagaggatgaactcataacgaaggaaatgtttctagcattaatccatatacttcctggacgcgagaccatgctatagctcgttcctattctcagactgatggtataatcttggagttaaagccgaagccaaaaaggtaattaaaaatggtcatgggagttttctgatgataaatattttgaacaagaagttcttatgcaagggattcgtgatagcggcatcgaggtatttaaaccatgataactattgattttttgataagcaggctcagttgttttgataataaaatattgtctaaagagacaattgatttactttcgacctcgataaaattgatcgaggtcgaatatgataaaaacatagctatcaatgagtttaaaatacatcgaaaatatcttgacaaggctggcgttaaatactttggaattaatgagctaatagatatgcttatgaaaatttcagatgagaaaatattaattaagtcatgtattgaaaatttttatggagctaaatcataatgttattggtgtggttggatttgaaaaacgtaaaagaactccagaagagattgaacgggaaatgcataatttaagaagaaagtagattttgtgctatacctaaaataccatcatcatcaatggatgatttgttggcgactggaaatattggtgatgataaaatgagtaaggggaggtagttaactatgttacatggactaaccaaagacgagcatggtttcattaggtttgttattggaaataattcagcttctcaaaaaaagctttgtacggtatagcactaaaacgtggtaaagatctgggagaggaatgtccctctaaagctgcattgcaagcattataaaaacaccctgagattgagcagcatttcaggggtactttcccgttcattgatttttaaattacttccccctgttcttattaattctaacatggggggcttggggctaagttttacggtgaatgacagagggaaggcaagcaggcccgcacggtgtgccactggaggaaccaacctgcccagcattttctgtgggataagcgacccgggctgtcaccgtgatccatcaggacggttcacgggagacctaccaacataacatccgattccgccgccggatgaaaaaggtcgacctggacggggcgatccaccgcaacggtttgcggcagggcctgatactgtatccgaacatgccgattttgcttcctgctagtttcggctggaacccggaaatgtgtcaggcgctgtgcgccacctcaataccaacaacaaattggcttccgattatcgtagaccgttgataaagtgaccgacgggtaggcgaagggaaaccagcatggtcgaacgtattgattatcagattgaaaaatatagcttcgcggaagttaatgaaacgccgcgcattgcgcaacaatgggctgaagtcctcaaagaataccgtcaggtacatgctggaagtatcgagcgtctgcgcatcgcattgctgaatgtggattatgtcaccagctttgaactgccttttcgtttgctgttggtgcgtgccccacaactgattgccgagctgcgtgatgaactgcaactcagtcagaaaagcgcagtgttcaacggcaagcgttttggctgtgtttacagcgtgaaggctgatttgagtaaggtaccggatgaatttcaataccgtctgtcaacccgcattcgccgggaagtatcgtcaggcgaaaccgcagagccttaccgggaaattgccagggaaataaaaatgccgcgcgagcgacttaaaaaggcgcttgagaacggactcgcggtaacggcgctggatggtctgttttggttcggtatgcagcgaatggcagccgacgtggcagtacttagaaaaaaggggatgcgtattgcgacctcagaggttcaggcgtgggacagtctcaccactatcctccgccccgtaccgctataccgatgtgtctgatatgctcattgtcactgttgttatcttttcgatcacaggagtcgcacttgaca

SEQ ID NO: 331 - DNA, 41852 bp, unknown
  Altogen  635822 strain
tcccctctccttggggagagggccatgggatcaccttggcaccgtaattgcactagctgaagcttcggccattcatcgccgaacaacggaggacagatgcatgaaataaccctgtgccatcatgcgatggaaatcatgcagcaacacgcccggcaaaatcatgcccggcgtattaccgccgtctggtttgagattggcgcattttcctgcgtggaggcggagtccctacggttctgcttcgacatggtttgtcgcggcaccttggccgaaggctgtgagttacatctgctcgaacaacaggcccagtgctggtgtcacgactgccgggcggagatgcaactgctggttccccaggtgttgatctgcccgcaatgcggcgggcgcaacctacgggtgcaggcggatgacggcttgcaactcaagcgcctggaaattgaataaccaagaggaaaaagcatgtgtataggcattcccggtaaggttgtggcgctggacgaaaaccaaccccagcacgcttgggtcgacgtctgcggtgtgcaacgagaagtgaatattgccctggtgtgtcaggacgatgaagcgccagaagcgctaatcggtagctgggtgctgatccatgtaggctttgccatgagccgcctggatgagcacgaagcacaggaaaccttgtcggcgctgcaagctatgggagaagtggagcaggacgtcgcgctgttcctggcaggcgaaggtgaccaggaacggcgataaattgtgctatccccggcaaatgatattcctgttgcggtgttttgttgatccggtcgggagaaattaccattaacaaaccttactctttgtgaggatgttcgctggcaataatcttcgtgactcagacaagtgataaaccatgtcgactgtacgcttagaacaacaagacctgctcgaaattacccgcatgctgctcgggcagcataatttcatcgatctgttactgcaattgcgtcaggtgttgcggcgcctgcaactggccgacagcgtcgcgttggtgctatttgatccccatagcgaacgggtgagttttcacgggctggatcacgcgcagcagccggtaaactatcaggacgaaacgctgctggcgaatggcccggtgagccgcttccaacacagctcgttaccccaacgctggcaggccgatgagctgcacgatcgctatccgcaaatccgcgccctgaagttgcatccgcccttcaaccaatactgtttgatgccgctacatgcgggcggtcggccgctcggtggctgtgaattactgcgtagcggaaacgagccgttcagcgatgccagcctggtgcagttgcaaacgctgatggagctggtggcgctggccacgcagcagattgttttgctggaaaacgcgcaagggctacagcaccaactgcgtcatgagctggatgactatcgcatcttggtggatgtcaccaatgcggtgctgtcaaagctggatctggatgacgtaatgggggagatctcggagaaaattcaccactttttcaacagtgacgccatcagcatcgtgttacgcagtaatcacgccgagcagctcaccatctactccacccactatctgaacaataacgccgccgaacgccagcagtacaacgtggcgttggcaggcaccttaactgaacgggtgatgcgcagcggcgaaatgctgctgctgaacctgaaaaatgccgagcagctttctggctatgaacgtcggctgtttgatctttcacaaggccggatcgaggcattgtgcgtattgccactgatatttggccaaaagaagctgggcgtgctgaagttggcacaatgtcaggcggatggcttcaatgcggccaacttgcgggtgctgcaacagattgccgagcgtattgccatcgcggtggataacgcgctggcctgtcaggagatcaaccggctcaaagagagcctggtacatgagaacctgtatctgaccgagcagatcaacgtcaatcatcccgatctgagcgagattgtcgggcgtagcgcggggatgtctgcggtactcaaacaggtcgaaatcgtggctaaaagcgactgttcggtactgatcctcggggaaacgggcaccggcaaggagctgattgcgcgagcgatccataacctgagcgaacggcgtgaccagcgcatggtgaaaatgaactgtgcggtaatgcctgcgggtttgttggaaagcgacctgtttggccatgaaaaaggctcgtttaccggggcttccacgcaacgcatgggccgatttgagctggcggagaaggggacactgttcctcgatgaagtgggggagatccccattgagctgcaacccaagctgctgcgggtgttacaggagcgggagtttgagcgagtcggtggcaacaaaccgatctctgttgatatccgtctgatcgccgctaccaaccgggatttgcaacagatggtggccgatcgtgagtttcgcagcgatctgttctatcgcctgaacgtgtttcctatcgtcattccaccgctgcgcgaacggcctgaggatatcccccagttggtgaagttcctgacccataaaatcgctcgccgcatgaaacgcaccatcgacagtatcccggcgcaaacgctgcggttattaagccagatgccatggccgggcaacgtgcgtgaactggagaacgtgattgagcgggcggtattgctgacgcgtggctcggtgcttgagctgccgctacctgaattgccgtattcgcaacccgcagtggtgctctccgcgccagccaaggaaacggtatcgccggaggaggatgagcgccaacgggtgctacgtgtgctgagagaaaccaacggcgtagtcgccgggccacgaggggccgcacagcgccttgggctaaaacggacaacgctgctatcgcggatgaaaaagtgggggatttcggtgaattgagcggcgtaacgtcctgtttttggtctttttattactcccaactttccgaagctgtatggtctaacttcgcactctatgcagctccctctccctgtagggatcgagttcgttgatttttcggtgtaatgcccagtctttggtctttttattactcccaacttttcgacgctgtacgggctaacttcgcactctatgcagctccctctccctgtgggagagggttggggtgagggggagattaatagactaattcaaagggttagtgatacttacttacgcgcatccagcagttgggcggcgttttcggtggtcaccacggtccatggcaccgagtagcgtttagccgtgccgttatcccactgcatctggcctgcatactgcttccagatatccgactgtggctgatagctgtcgccttttaccgcgcgcagcgctacatcgatagaaccctgcatctgggcatgggcatcttgcagaatcgacaccatctcaccggcctgtacggcacgaatggcatcggagacgccgtcgaccccggcaatcgcaaaatctttcacgttcagattggcacccttgatggcttcaatcgctcccaaggccatttcgtcgttttgcgcgatgacgccgttaatctggccacggtgtttctgcaaccagttttccatcagcggcagtgcctcggcacgtgaccagttggccgtcttgcgctccagcaccttgattttgcctgggccacattcggcaatagccttgtcgttgccttgtccgcgctggatctcgccgctgccgccttttggcccttcgataatcaccacgttgccctggcagttcattttttgcagcaccgctttggcttccagatacccgcccagcacgtcgtcagagaccacttcagaggtcatctggtcggtattcaaacgggcgttggtgactaccaccgggatcttggccttgttggccatggtcactacatcgatgttggcctcgtaatccattgggttaatgatgatggcatcagtcttggtctgaatggcggtttctgcctgattgttctgcaccatcgggtcatagcggccatcgtaaacggtgagctgcacgttgccgtttttaacctcaggatgctctttcgccgccttttccatcagttggacaaactcggccttcatgccgtacatcagcacggcgattttcaccggggcggcctgggccaacgttgaggtccccagcagcaggccggaggtgagcaacgcaattttggtcatcttgttcatggtgactcctggttatagggttttgttgttatgaggtaagttagtcacgctgttgtttgcgtgacgggtcgagcaacacggcgacaacaatcaatgcgcccttgatgatctgctggtaataggactgcacaccgagcaaatcgaggccgttattcatcacgccgataatcaatacgccgaacagggtgccaaccaaggtgccgacgccgccggccatgctggtgccgccaatgaccacggcggcaatggcgtccagctcgtaggcgctaccggcgttggtttgtgcggagccggtacgggccgtcaggatcaaaccggcgatgcccgccagggcagcacacagggtgtagaccaataccttgatttggatcacgctgatgccggaggtgcgggcgctcttctggttgccccccacggcatacacatggcggccgaagatggtcttattgagcaggatccaggcgagcacaaacagggcggtgaaaataatcaccggcaccgggatgcccagcacatagccattgcctaaccagcggaaatcgttgttgagttgggaaaccgggttaccgtcggtcgtcagcagcgccaggccacgggcagcggaaagcatccccatggtgacgatgaagggctgcaagcggtagcgggccagaatggtgccgttgatcagcccgcagacgataccgatgcccagggcgacaatcagcggcaccatcacggcgtgcgcggtatcgccgatagacagcccgctgttggtggtggcaaagcgggcggcaacgatgccgctcagcgccaataccgagcccacggaaagatcgaccccggcggtaataatcacaaaggtcatgccgatggccagaatgccgttaatcgagatctggcgcagaacgatcagcatgttctcgtcgcttaagaagtaattgctgctccaggcaccttgcgccacctgaacttcgccaatcaccgtgacgatcagacacaacacgaagaaggcgataataatgccgtatttgtgcagatgtcgtttattttgcgtaaaaaaagctaacccgggcgttaatgagtgggtgccattcatagtaagttctctttaaaataatgagttgattgcctggctatacggccagtttcattagttccgcctgcgtggcgtttttagtcgataattcaccggcgagcatgccgttacgaaacaccagaatgcggtcgctcataccgataatttctgacagctcggaagacaccatgatgatcgctttatccttcagcgcgaattcggacataaagcggtagatctcttttttggcccccacgtcaatgccgcgcgtcggctcatcgagcagcatgatttgcggatcgagcaaggcccaacgccccaaaaccaccttctgctggttgccgccgctcaggttgccgacgatgtggtcgacatcgggggttttgatgttgaagcgctggatcatatcgttggcacgctgctgttcctggcctgggttaatcatgcccagttggctgatggcacccagcgaagctacgttgatattttctttaaccgagcggcacagcaccaggccggtatccttgcggtcttccgtcacgtaggccaggccgctgttgattgattcttgtggtgaatgtttggcgagctgacgatcgccgatctggatggtgccgctgtccgcgtgctgaatgccaaagatcagatcgaggaactcactgcgcccggaccctaccagcccgtaaatccccaggatctcgccgcgttttaacgtcaggctgatgtcgcggatcttgttgccccagcacaggtgctgcacctccatcatcacttcatcgccgggctgattgaattttgcaaactcgctttcgaactcgccgccaatgatgtgctcgatcagttgctcgcgggtgatatcttgcaacaacccttcatggatatagctaccgtcgcggaaaatggtgtagctgtcggcaatctggaagatctcggacagacggtgcgagacataaatgatgcctttgcccttggcggccaaacgggtgatcgcctggaagattttctgcacgtcctcctcgccgatggccgacgtgggttcatccatgatgatgatgtcggcatcggagtgggagagggccttggcgatctccaccagttgctgctccgccacgctgaggttgcgcattttttccgtcggcgacagggcaaaatgcaggtcctgcaacagcgcagcggtctgctggttcatggttttgaaatccacaaaccccaggcggcggggttcgcgccccagccagatgttttcggccaccgtcagatcggggatggcgctcagctcttgttgcacgatggcgatgcctgccgccagcgcctcttttggatgagcaaattcacagcgttggccattgacgaaaatatcgccgctgtcgggctggataaagcccatcaggatgctgagaaaggtggatttcccggcaccgttgccgccgcacagcgcgtggatcgaccctttgcgcaggcagaattcggcgtttttcagtgcgacgacggagccaaacgacttcctcacgccggtgacttccagcaagtaggccggggcttgggtctggggatcgcgtgtcatagcttcacctcgggatactctttttgcagtaggttcaggtaaccggcatacagatcggcatattgccgctggcgctgcggatccggcatcacgcgggtctcttcatccagccggacaaaacgctggcatagcctggttaactcttctgaggccaacaggtcgggttgggccacaaggttgtcacaccacatagcttgaatggcggcacccaacgcagcggtttccttttctgccagacacaccaccgggcagttcatcacgtcggcaacgatctgccgccagcaggcgctgcgagcgccaccgccggtgaggcgaatttcgctggtggaaataccttgctgctggaacaggtcgaggccgtaacgcaggccataggtagcgctttctactacggcccggcacaggttggctccggtaaagttgtcactgtccaggttatgcaggctggccttggctgcgggcagtggtggaacgcgctcgccgttgaagaatggcagcatcatcacacccgccgctccaggctcggtggcggcaagggcctgattgaatccggccacgtcctgctgtaacaggcgctgtaccgaggtgctggcagaggtgacgttcatggtgcaaatcagcggcagccagccgttgctgctggagcagaaaccggcaatcgcttcagaatggctgaccaccggccgatcggcataggcaaacagcgtcccggaggtgccgagactcatggtcacgataccggggcgaatgttaccggtgccgattgccgccatcatgttgtcgccgccgccgctggccacccggacattgggctgcagacccagcagggctgcgacttccgggcgcaagtagccaacgctttcctcggcgttgatcaggcgaggcagggcgttccacagcaggccgctatcgtcgatcagcgctacggcatcgcgatcccagcagcgctgacgaatgtcaaacagcccgctgccggaggcatcgccaaattccgcgacccgctctccggtcagccagaagttaagatagtcatgcggtaacagtaccgttttcaaccgtgcccacagctgtggatgttgttgcttgaaccacaggatcttggacgcggtatagcccgccgccaccatcagccccagcttctgcaaggaacctttgatgccacccaggcccgccagcagaacgtcgttttcccgctgtgtggaggtgtcgcaccatagtttcaccgcgtgtagcacgtcgccttgttcatccaaagcaacgaaaccgtgctgctgcccggaaaccgacagggcgacaatggccgctgggtcaatgctggcgctgtcgatcgcctgacgaaatgccagcaacaatgcctcaatccaccactcggtcaactgttcccggcggccggaagagtcgctgatcatctcatgcggcgcgctgccttcgcccacgatggtgccggatgtgccatcgacaatcaccaccttggtgccttgtgtaccacagtcgatgcctgcatagagcgccatgggttactccatttccaacatgattttgatgtcggttggatgacccgccgccgcgcgttcaaaggcggccacgctgtctttgaacttgaagctttgcgagatcagcggctggacccgcaacttgccggagctgagcaggcgcagggtgcgtggatacatattggcgtaacggaaaatggtcttgaaggtgacctctttggcctgggcggccacgatgtccatgggggctgcatcgatcggcatgccgaccagcactgcggtgccaccgggagcaatatgctcgctgacgccgccgatggccggtttggccccgctgcattcgaacacgatgtcgacgccgttgccgctggtcaactcggcgaccttttgcgccaggttgccggttttgatattgaccgcgtgcagcccctcataattggcggccacctgcagtttctcttcaaacagatcgcagataatcacatctgagcagccaccggccaacgccgccagggcggtcaccacgccgatggggccagcgccaatcaccagcgcgatatcacccggcttgatcgcggccttggtggcggcgtgcatcccgatagccaagggttcaaccatggcaccctcggcaaagctgacgttatccggcagtttaaaggtgaaggcggcagggtggatgacgctctctctcaggcagccgtggatcggcggcgtggcccagaagcgaacggctggatccaggttgtagatccctgcacgggattgctgtgattgcagatcgggaatgccaggctccatgcaaacccgatcgccaacctgcaggtggcgaacgtttttgccaaccgccatgacgacgccggcagcttcatggcctagcaccatcggggcgttaaccacgaacggtccaatgcggccatgctgatagtaatgcacatcgctgccgcaaataccgacggaatggatcttgacctgtacatcgttttcgccaaggacttcatcaaactgacaatcctggatgctgattttaccgggtttttctagcactaatgcttgcatggttatcatcctttcgtatcatttttatggtatcgatatcatttcaatgatcaggatagtaagcgcgagcgggctaaaaatgtgtgatgttggttgtgttttttgcttttgtgttaaaatttgttggtttaatgaggtgaaatagtcgttaagatcacatttattggcatgtgatgttaattatgatggtatcgatatcattaacgttaacgaggacatcatgcagcgacctatcgatgcgttagaaagaacccaaaccttgcttgcagactgtggcatacggttgaccgacgtggaaaaacaggagatcgagctgacggatttcggcctggccgattacccgcgctcggggttacagctactcacttacattaacaccccgcgctactgtgccaaggagctggtgttgtttccacaccagacctgtccggagcatctccatccgccgtttgatgatacgccgggcaaacaggaaacgttccgctgccgctggggggaggtctatctgtttgtggatgatgatgccctgaccttgaacaccgagcgggggaccccagcctgtcaacctccagccgggttcgaacagtggtatacctgccagcgttatattttgttgcgcgcgggagaacaatatacaatcaagcctaataccagacactggttccaggcaggcaagcttggcgcggtggtttctgagttctcgtcgcaaagccgtgatgatctggatgtttttaccgatcccaacgtccggcgcgtcggttgatgctgcggtgatgagagtatttacataagaggtgataatccttgatcaccttgtcatgatacaaaatgatatgttccaaccaggagtcacacttggcggccgatcgaccactgaaagcgacgctagagagcgtcgcagcgcttgcaaatgtcagcaaaattaccgtatcccgcgccttctcccagccggataaagtccaccccgatacgctcgatcgcatcctcaagacggcggagagtctggggtatgtgatgaacacggccgcacgcaatctgcgggctaaagcaagcaaaacgatcggcatcgtcaaccctgatatggccaacccgttttttggcgcactcacccggctgatgacgctggaggcgcagaaagcgggctacgatacgctggtgtttgactcttatgagtcgcaggagaatgaaaaccgcattatcgataaactgattggctacaacgtggacgccatcattttatcggtgatttcatcggaccgaaactacacgcccggttacctgaaaaacctggaaagactcggcatcccggtggtgctggtcgatcgggaactggatggggcgttttgcagcggtgtgtatatcgacaatctggactgtggtttacaggcggggcgttatctgctggagcagaacagccaaaaggtggtggtggtttccgggccagaggattccaacgtggccaaagagcgggttaccgggctgattgctgcgctgcaaggcaaggtggcgagcctggagattattcatgcggatttctatatggatgccgccctgcgcgtgactaacgagtatctcgatcgccagccgccgccagactattttgtcggctgcaataaccagatctcgctaggcatcatcaaatcctgtgtcgatcatcgtttggcgctgatgaaagatgtctcgctgtttggtattgatgaagtttccaatgcggcgatttacgggtttaatttcccctgtatttcccacgatctgcatgaaatcgcctggcaggcgttaggtttggctatccgtcgggccgtcgatcacgatattaaaccgggtaaagtcattgtcagaggcaagctgattggcggctagccgctggccattgagcttggtggtaggtgcaaataaaaacagccaatctctcgattggctgcttgggcgaagctaaggctggccttaggcttcgattggggcacgccagtcgtcagaacccgaagtcccggcggtggtgtgttcccaagtgattttacggtatgccagtgaaacgcgaaccaactgagtgaactcagccttggttggatcctggcagtgtggcattttgcagtcgatatcgatgatggtggcatcttccagtttggtggtaaagaagtgctcttgtttaccttcgatcgaggtgcggtaccatttcaattcaaccgttggcagcatttcgccagaggccaatgcgttatacagcaatggaacagctttgttataagccacggtgaagcggaatggcttatgtgcacgctgccctgacggctggccagactgcggatcggttggtacggtaacaatatgttcaaattcctgaaccagcatttggtcttcgtggccttgaacaaagatgttaccgacagattcagcggtaaatgcgctggcggtaatattaccctgggttttccctgtgatagagatataagctggagttggcatcttaaagatccttgttagataagcttagtaataactcaatgctagtcacacccctcgccgataataatcgacctcgaatgtgacttgccccacttctcacttcggccatcactataatcgggtctttccctagtgccaagccactcacaaatttgcaaggtttattggtatccttaatggtataaatgattataatatttgtattattggtgttttatgctggattagatattgatgtaggttatggtttgtgggttaaacataactattaaaattatattatttcataactatatgtttttattgcattaattaaattttataaaattattttttatgatcataagccgaaagttgctctcgccaggagataaattattaggaagcttagtaaagaaaaatttatggacttttaccggtcagatcggggacgatacattcagtgaagctatgctaatgcaggaaatgtccagtttttgccgtgggcagcaatcccgtgttcggggttttgtcattatttgggataattctcagagtctcgtgaaatataggaggattcccaactttgcgcgtaaaaccggattattcgcagacttcggcacggcataggaggaaggtatttaggtttacggtgatagatttactatctgaatagatggcgatgactctattagcatggatgatatctgaatgtcattttccggtgctcattcaacaaacattagctggtattcccttattgtgactaaaaggacgagtgatgagtaagaataatcaaagcagtgttgcccccaaggaaaggatcaacattaagtatgttcctaacacgggcgatcaaaccactgaaatcgaactgccactgaacctgatggttgttggcgatctcaagggggttcgtgaagatactccgattgaagaacgtcaggtcgtttccgtcagcaagaacaactttaacgcggtgatgaacgaagccaatattaacctttcgttcactgtacccaatcacctggaaggcgaagggaaagaagagatgccggtaacattggcgatcaattccctcgacgatttctcaccggataacgtggcgaaaaacgtccctgaactgaaaaaaattctggaactgcgggaagcgctggtcgccctgaaagggcctctgggcaacattcctgccttccgttctcgtctgcaagatctcctaggcaatgaagaaatgcgtgagcagttgctaaaggaactggacattcttaatcagaaataattgagacggaaagagggaattttacgtatgtctttacatgaagaaaatgcggttttagctgccgaacctaccagtaccactttcctgctagacgaaatcatgtctcagacccgcatgatgccgggcaatgatggctatgacgtcgccaaacagggcgtggctgcatttatcagcagcattctggacaccggcaccaacgaagaaccgatcaacaagctgttggtcgacagaatgatcattgagctggataaaaagctcagtgcccagatggacgaaattctgcatgccaaagaattccgcgaaatcgaatcctcctggcgttcactgaagctgttggtggatcgcaccgatttccgtgaaaacatcaaaatcaacatcatgcacgcgacgaaagaagagctgctggaagattttgagttctcgccggaaattatccagtctggtttctacaagcacgtgtactcatccggttacggccagtttggcggcgaacctaccgcagccatcatcggtaactatgcgttcagcaacagcaccccggatatgaagctgctgcaatacgtcagcgccgttggggccatggcacatgcgccgttcctttccagcgttgcgccggacttctttggtatcaacagctttaccgagctgccagccatcaaagacatgaagtcggtgttcgaagggccagcacacaccaaatggcgtgcgctgcgcgagtcggaagactcccgctatctgggcctgaccacgccacgtttcctgctgcgtttgccgtattccaccgttgaaaacccgatcaagaatttcaactactacgaagacgtcagcaaggatcacgaacacttcctgtggggtaacaccgcattcctgctggcagcctgcctgacagacagcttcgccaagtatcgctggtgtcctaacattatcgggccacaaagcggtggtgcggtgcacaacctgccggttcacctctatgaggcgatgggccaggtacaggcgaagatcccgaccgaagtgctgatcaccgatcgtcgtgaatttgagctggcggaagagggctttattaccctgaccatgcgcaaaggaaccgacaacgcggccttcttctcggccaactcggtccaaaagccgaaggtattcccgaatacccatgaagggcggatggcggaaaccaactacaagttgggtacccaactgccgtacatgttcatcatcaaccgtctggctcactacatcaaagtgctacagcgtgagcagattggttcgtggaaagagcgtcaggatctggagcgtgagctgaacatctggctcaagcaatacattgccgatcaggaaaacccgccgaccgatgtccgcagccgccgtcctctgcgctctgctcagatccaggtgctggatgtcgaaggggatccgggctggtaccaggtggcgatgcaggtgcgtccacacttcaaatacatgggagccagtttcgagctctcgctggttggtcgtttggataaggaataacaggcaatggctgcgcttcttaattgggagcgaggaagttctgccagcttgtttgagcgtatccaggggaagggctttggcccttcctcacatagccgtgttcaagagctattaatctcaatcaagcagcatttgaacgaagtcctcaattcgcgccccggagcctgccaaagtgctgcaggcctgggggttattgatctcaatgatgccacggcaaccacgtctgatttccgtaagagtattgagcaggccatcaaggagtgtattgagcgctacgagccaagaatttccgaggttgccgttcaatccctggtggatcagggggacccactgttattgagtttccatatcagtgctcacgttgatttcgacaatatcggcgatgtggttgagttcaacatccaattggacagcaaccgccgttactgcctaaaccaggaagcataatgtcgttcgaaaagtacttcagggatgagctggattatctccggcagctagggcgtgatgccgcaatcgaacggccgcaccttgctgcctttttatccgaacagggttccgatcctgacgttgagcggctgttggaaggcttcgcctttctgaccggcaatctgcgcgaaaagatcgacgaccagttcccggagttgacacacggcctgctgaatatgctgtggccgaactatttgcggccagtgcccagcatgaccatcgtcgaatacacgccgaacagcagtgcactcactgaagcgacgttgatcgagcgtggtagccagatcgagagcgtcccgattgcgcaaagggcggaacgtggtgcgttgcaaaacgacagcgaaacacacgggccccagtgcagcttcaccctctgtcgggatgtctggctgtttccgatgggcattcaggatatcgccgtcaacaacagcaacgaacaggggatattgagcattcactttggcgccaaggcagagttgaacgtgcaagaaatgcggctcgataaactgcgtttctatctgggtgaggacggttacaccagcacccagctctatttctggatcagtcactatttcgaacgggccgatctggtggtcaatggcatcaccattccgatgccggacttcgatttcaacccggtgggctttgagcgtgaagatgcgctgttgccttatccgaaaaacgcctatgtcggctaccgtatcctgcaggagtatttctgtttcccggaaggcttcctgttctttgacgtggccggcgtggtggatttccccgcgcatctgaaagccagcgaattcaccctcaatctgcatttctcccagccattgccgcctgaggtcaagatacggccaaccaccctgcgcctgaactgcaccccggcggtgaacctgttcaaacgcgacagcgaggcgatagccctggatggcacacaaaccgaatatccgctgtgtgccagctaccatcatcctgagcgctacgagattttctcggtcgatcgcgtggagagctggttaagcaaagatcccaagggcagcgggcgggggcaggccagaagctatccggcgttcgaaagtttccatcatcaggtggaacctgcgcaggagcgcaacatgctctattaccgcctgcgggtgagaaattcgctgttccgtaagggctttgagcattacatctcctttgtgcgcagtgatgagacgcaggtggcgctgtctcaagaaaacgtgtcggtcagcatgacctgtaccaaccgcgaattaccgctggcgctacgcgtgggtgatatctgccaacggacgcaagcaggcccgtcatttgccaccttccgtaatattacccggccttcggtaccgctgtatccggtgttggatggcagcctgcaatggtctttgttgtccaatatgtcattgaactacatgtcattactggacaaggattcgttaaaacagatcctgcagacctatgattttcccagcgtacacaaccggcaatccgctcggtcgtcgcaaaaaaaactggacgcgatttcgcgtatcgaaacccagccgatcgacaggttgttccgtggtttaccggtcagaggtctgcaaaccaccctctggttggagcaaagcgcttttggttctgaaggtgagctttacctgtttggtacggtgttggcacgcttcttctccctgtatgccagcgtcaactcgttccaccttttgaaagtcatcaatcttgataatcaggaatgttaccaatggccggtacagacgggtcaacatgcattgatgtaagcgcgggtgaaggcgtaccgccggagccagtgctggatgtgtcacgttataacttttaccaattggtcgagctgctcaaccaaatggcggtagcgtggcaaaaatccccgggttcagccaggccagccgatgaggctatccgctttaaatcgaccgccagcctggcttttccaacccgtgacgtgatcgcgttggagacttccgctcgcggccagtttgagctggaagtctctttccttgggttgcatggcagccagtcgccgttacccggttactacctggattcgttggcctgggaagatgcccagaatgaaaaccgcctgacggattttctcaacgtgttcaaccaccggctgttaacgctgctgcatcagatttggcgcaaataccgctactacatctgctttgacgagggtggtaacgatgatgtctcgcagcgcatgtttgcgctagtgggattaagtaacgagacgatccgcaaaaaactgcgcatccaccacggcaaaatgctggcctatgccggcttgctggccagccctgggcgtgccccggaagtgatttgcagcctggtggcgcactgtttcaacctggcggatgtgacgctgcaaagttggcaactgcgcaaggtcaaaattgccccggagcagcagaatcggctgggcggcagggtgaaggtcagcggccagaaataccaggggaaatcggtgctaggcgtcaatttctcactgggatcgcaggtagcggatcgcagtggaaaatatcagttgtgcctcaaccaactgacgcgtgaacagttcttgtcatttttacctaacggggagaattacgagccgttagagatgtttgtggctttcattatgcgtgaccagttttcgtgggatttacgcctgggtctggcagagcagcaggtgggcggcatgatcctggggacagaacaaaacaacctgctgggctggaccagcttcctcggggaacccgagcaacagccccacgtaaccatcagcgttatggaatgacaatcaagattcaggaagagagatcatggataaacagcaaccgacgctatcattgcgagtcgtcaatagcgacagattggaaagtggcaaaccggccagcagcctgtttaatgcacagggtggggtggttggcagtgacggcagccatcattggtctattcaagatcagggcggcaatatcagcccttcacagtttgccattgaatggcgtgatgggtccttttgcctgcgggtgctcaacggtgcggtgagtattaaccagtcgatgctgacggcaaactccggtttggtgcgcatccagcaaggtgatgaaatcagcgtaggcaatctggccatcaagagccatatcagccgctcgagcgccgatatgatcgatccgctgatggtttcgccagaatcgctggtctccagctacagcaacccgctggaagcgatgatggaagggggcaatacacaggtttcccaccatgagcaggacaaccgcctcgccgccacggtcgccaacggtttcagccacgacccgctgcgggtattggaaaccgagagcctgacgatgcacgaacctctgagcgccctcaccggtgccgatcaatcattacaacaggatcgctaccgcgatccgctgttctcttctccactttctgatatcaccaaggacagtgccatggatcaggagtttatcgatctgccgcaaatcagcagttttctttccggccagcaggcaccgtcagacagcaagatggaacagcagcacgtggcgatcacgccgctgatgcggggttttggcgcgcaactgccaatccgcaacagccaggaggccaatgacttcctcgaggaagctggcaaaacgctcagggccgccattgaagggctattggccttgcagcgcagccaacacggcctgcgggacaaacatttgcggccaatcgaagataacccgctgcgcctgaatatggattacgacaccaccctcagcctgctgtttgccgatcaaaaaagcccggtgcacctttccgccccggcggcggtggccgagagcctgcataacctgcgcctgcaccatcaggccaaccaacaggcgattgcccaggcgttgagcaccatgctggaagctttctccccagagcggttgctgacgcgctttagccattacatgcgcagcaacgagcgccaggaacaagactccgcctgggcctgggaaatgtacaaaaactactaccaggaattggcctccagccgccagcagggtttcgaaaagctgtttggcgaagtgtatgaacaggcttatgaccaggcgctgcgccaggggatgaaggacagcgaacgatgaaaggtggcagaggatactttctgacgactgcgctatgcctggtgctgatgctgtcaggatgcacgatatggaaaaacaagaagccggagcgcgttaccgagcagccttctacgctgcggttaacgctgctggcggacgcgaacatcaaccccaatgagaaaggtgaggccgcgccgaccgagattgcggtggtgtacctgagcgacgattccaaactgttggcggccgattacgaccagctcgacacggaaatattgaagaaaacgctcagtaagaactacatcgaccaccaggaatcccccctgctgccgagccaatataaaccgttacccgccattgagctggaagagaagacccactatctgggggtgattgcctactatgccgacgttgatcgcgctgaatggaaaaaaatcatcaagctcagcgatgttggtcataactacggcgtgctgatccacgttaaagcggatgaaatcgacttaaggaaagaggaagaataaccatgccgaccaagaatcgggtgatctggcgcgaaggcctgttcattaagccacaacactttcaacagcaacaaagacataacgattatcagctgcagcgccgcatcaccgcgctgaccaattacacctatggcttccactcgctgcagatcaatcaggaactgctcaagctggggcgtatcggcttgaccaacgccagcggtagcatggccgatggcacggtgtttgatattccttatcaggattgctcgcccaagccgctggatgtactgaactgcaacgatgccgccagccgcgatatctatctggcgttgccgatgctcaacgacaccatcaatgaggttgccagcccgcacagccaactgcctggggcgatccgctacgccgaacataccgatgacgtgcgtgacttgcacaccgacggcggcgatgtcagccaattgctgctggcccagttggcaccgcgtttgatgcagggatctgaagatctcagcgcctattccgtgctgccggtctgccgcatcaaagagaagcacccggacggctcgctgatcctggatgaagaatttattcctacctgcaccaccctgcacgcttccgtacagttgaaagacttcatggatgaagtggaaggcaccttggtggagcgcgcccggttgctggccaaacgtatcggttcgccgggccagcaggggattgccgacgtggccgaatttatgatgctgcaggtgttcaaccgcatgcagccactattcacccatctgtcccatcaggcagtgctgcacccacaggatttttatagccacctggtgcaaacctgcggcgagttgcgcacctttaccgacgaatcacgtctggcgggcagcttcatcgtctataaccatgacaacctgaccgactgcttccagccgctattcctggcgatgcgccaaacgctcagcacggtgctgacaccgcgtgccatctcggtacagctgcatccgcagcctaacggcattcgtgtggggacgatcaacgacagcgatctgttgcgcagcgccgactttgtgctggccgtccgggcgcagatcccgcaggaacagctgcggcgccaattcgtgcagcaaaccaagatcacctcgctggagaaaatccgtgagctggttagcctgcaactgccaggtgtgccgctggtggcgctctctgccgcaccgcgtcaactgccttaccattccggctatacctacttcatgttggatcgacaaagcccgacctggaaagaggtcctgcaaagcaacgcgattgccttccacgtttcgggtgacttcccagaactggatatgcagttctgggcgattaggagcagctaatgaaaatgcatgccgtcacggataaccccgcgctgcccgaaacggaaaccgtcacttcgtatcggcaatatcagctcccgctgcgcggcgagagcctgaatgcgatggtggatgccgccacgccgttactcggcatggtgctgcgcttgaaggacatggaaaaccagccgctgccagaccagctttatcagcaggtggtgacggatatccgcgccattgagcagtttctgcaaaccaaaggctacgagccaggggcgatcgtttcgttccgctacgtgctttgtacctttatcgatgagacggcgttagggcacggttggaatacgcaaaacggctggttgcagcagtccttgctggtgcatttccataacgaaacctggggcggcgagaaggtgtacgtcctgctggagcgcctgatgggtgaacccaaacgttatcaggatctgctggagttcatctacctgtgtttctgcctgggttatcgcggccgctacaaggtgacattgcaaaacagcgatgactttgaacggctgttccgtcggctgcatcaccaactgcaacagctgcgcggtgaagcccccgcgaccgtcttgcaccagaaacaaagccgcaccggcgggcgctattacctgagtaaacggttgaccatcaagcatctgctatggggtggcttaggcctgttgacggtgatttacctgttttatgccatccagttacatggacagactcaggatattttgcagcagctaaacaatttattgagctaggaagcacagatgattcaaattgacttgcccacgctggtaaaccgccttaatcccatcgcccgccatgcactggaggcggcggcggctcactgcgtcagcctgcaggaagcggaagtgacggtctcgcaggtattaatgcagatggtcgccagccccttaagcgacgtcagggtgatccttaatcatgctggcgtggacactgacgcattgcgtgagtcgctcgatcaacgtatttccggctatcagtcggtcactcaggcttatcccagcttctcccctttgctggtggagtggttgcaggacagttggttattggcgtcggccgaaatggatcacagccagctgcgcggcggggtgatgttgttgaccttactgctgagccctatgcgttatctcacaccggcggccagccggttgttatccccggtgaaccgcgaactgctgcgccagaactttgctgactggaccgccgattccgcagaagcccctcgggtagcgaaagcgggtgataaaaccgccgctgccgccgccaatggtgaaagcctgctggcgcgctatgccagcaatatgaccgagcaggcccgtaaaggtacgttagatccggtgctgtgccgcgatgaggaaatcgatttgatgatcgatatcctgtgccgccgccgcaagaacaacccgatcgtggtgggtgaggctggtgtaggaaaaagcgccctgatcgaaggcctggcgctgcgcatcgtggacggccaggtgccggaaaagttgtgcaacagcgaactgatgacgctggatctcggcgcgttgcaggccggggctgcggtaaaaggcgagttcgaaaagcgcttcaaggggatcatggcggaagttgcccagtcggccacgccgatcatcctgtttattgatgaagcccatacgctgatcggcgcgggcaatcagcagggtggcctggatatctccaacctgttgaaaccggcgttggcgcgcggtgagttgaaaaccatcgccgccaccacctggagcgaatacaaaaagtattttgagaaagacgccgcgctgtcgcgccgcttccaactggtgaaagtctctgagccgagtgctgaagaggccacggtgatcatgcgcggcctgcgcactatctatgagaaggcgcatggtgtgctgatcgacgacgaggcactacaggcgtcggcggtgctcagcgatcgctatctctctggccgccaactgccggacaaggccatcgacgtgctcgataccgccgccgcgcgggtggcgatcaacctgacttcggcaccgcgtcaggtatctgcactgaaaacgcagctgcatcagcaggcgatggaaatccagatgttggagcgtgagcagcgcctcaacctgagccagccggatgagcgtttatcggtgttgcaacagcagcgcgctgagatagaacagcaactggcagacctgaatgccagttggcaaacccagcagcagttggtgcagcagatcatcgccctgcgggcagagctgctgacgcaggaagaaaacgcgacggaagagcaggctattaatctggctgcactgggtgccgagcttgaacagttgcaacagcatcaaaccctggtgtctccacacgtggataaacatcagatcgcggcggtgatcgccgagtggaccggcgtgccgttaaaccgcctgtcgcagagcgaattgtcggtggttaccgagctgccaacgtatcttggcgaacagatcaaaggccaggaaaccgcgatccactgcctgcatcagcatttgctgaccgccagggccgatttgcgccgtccgggtcgcccaatgggggctttcctgctggtggggccaagcggtgtcggtaaaaccgagaccgtattgcagatctccgagctgttgtacggcgggcgccactatctcaccaccatcaacatgtccgagttccaggagaaacacaccgtttcgcgcctgatcggctcaccgccgggctatgtgggttatggcgaaggcggcgtgttgactgaagccattcgccagaaaccctattcggtggtgctgctcgacgaagtcgaaaaagcccatcccgacgtgctcaacctgttctatcaggcgttcgacaagggtgaactggccgacggcgaaggccgcatcatcgactgcaagaacgtggtgttcttcctgacctctaacctgggttatcagaccattgtcgatcacgccgaacagccggaactgctgggcgaattgctgtaccccgagctggcggccttcttcaaaccggccctgttggcgcgtatggaagtggtgccgtacctgccgctgggcaaagacacgctgcaaaccatcatccacggcaagctcaaacgcctggataacctgctgcgtcagcgctttaacgccgaagtggtgattgagcctgaggtaatcgacgagatcctgctgcgcgccacccgtgccgagaacggggcgcgcatgctggagtcgattatcgacggggcgttgttgccaccggtttccctactgctgttgcaaaaaatggcggcaggtacggcaatcagccatatccgcattgccacggagggaaatgcgtttaccgctcaggtcgaggaggcgctatgaggcaacggctgaaatgcttactggcgctgctggaaaacgattcggtcgagcatttggtccatggctttttgacgctggatcaccaccgtcacgggtttgatggcttgatggtggcgatgttcaacgccagcgaggggcagttggaatgtctgcgcctgtctgatgccaaccgtcgtgccacggtgaagctggaagccgatatcgaagacaccaatcacccgttggtgcgggtgctgcgtaatggcgcgcccgaagtctggtacgcgctcaatcgcggagtgcgcatcgaagatgacggctttcgcggctttattgaggcgttgcccaacggttgcagcatgtatggcgtaccgctgtttgatttccaggggcgggcctgcggggtgatagcggtgtttgccgaggagatcgatcgatttgtggacagccgcggcatgttctccatctattgccagatttttcagcaccgcctcaacaagctgcaagaggtggagcatctgcgatcgcaactggtccagctgcgttcgatgttcaaggtgcgtgaaaaacagctggatgagctgatggtctcgctgagtacctccgacgtttccacctcgccagaactatcacgcgattacagcaagatagatgacctgtctagcgcggtggaggcgtttgaagccgcggtactgacgcagcgccagcgtctgtacggcaatgacaaaaaccgcatcgccgacagcctggggatcacgccgcgcaccctgggttacaagttggcgaaatacaggtgttagctatgaatacgtggttattgatcggttcgttactgctttccggcagcaattcagccaccgagtggctaagcggcctttcgctgtcgcagcccgaaggggatgcgcatcagttggcgttgctgatgaactgccgcagtgaaagctcgccgctggtgcgtctggactgctacgacaacgcgttgtcagcggccagcggcgacaacccaggtcaggtacaggccgggccagcctggcagcgagctatggcgcaggaaaaaggccgccgcgatcattcgacggcattcctgataagcgaagggcagggcaacaacccgcaggtggtgctgaccacgcccgcgattggtgtgccgccacctcggccagtgctgatgctgagctgcatcgacaacattacccgtttgcaggtcgccttggtcggcccgcaaaaagacggtgcggtgacgctaacggcggatagcgacaggtttaacgtgcagtggttcctgcgtgaaaacggctatttgctggaatccagccggggcctggccggtattgatgagatcaagcggttgatgtcggcgcagacgctgacgatcgacggtaccaacggcgggttaccccgtctgacatttaatatttcgcagttaacgccagcgctgaaaccgctgcgtaacgcctgccactggtgaggactatggatagcacgtcacaacatccctggcatgcattattgctgacaccgctgacgcccgagcagaccgccaaggcgttggccgatgacgatccgcaatgggagcatatcgacagccagatggtcaaagtgggttcgctgacccacagctcgctgaatatcgatgaccttcagcagcaggcgatggctctgctgtcgcaaaaaagcaaagacttccgtttggtggtgcacctgctgcgtaccttgcagcacggtggtgaaccgggcgacctgatgctggcgatctccttgctgaccgcttacgtgcagaacttctggaccagtgcctggccgttgaacccgctgcataagcgccgctttgcccagcagatcctcaagcgttttgacagcgccagcggcagctttagccaacgggcgacggacgcccaacgccaggatgtgcaaggtttgctggcacatctggcccaggtttggcacagcgaggaaccggccctggcgaaagaggtggatagcctgcgtgccagctacgcgcggttgcctactcgcaccgttgaaccggtggttgaggaggaagaacgccctcagtctggttcggcatcgacatcagcctctgctggcagaacgatcagccccagcctgagcattgataactccagcgataaagcctggcggcaaacgctgctgaaaatggcggatttgctgtgtgaactgcaccccgaggccgccattggttttcgcctgcgtcgccatgccctgtggggcagcttgaccgcgccaccgatagcgcaggccgatgggcgcacgccgctggctgccgtttctgtcgatcgcatggccgattatctggggcgcgtggccactgcggatctggccctgtggcaacaggtggaacagagcctggcgctggcaccttactggctggatggccacgcgctttcggcgcagatcgctattcggctgggatatacaggggttgcgcaggccatacgtgacgagctgagcgcctttatcgagcggatgccggcgttaaccaccctttattttaccgatatgacgccattcctctcccctgaatctgccagctggttacagcaggaaacgggtgccaaagggggaggtaacactattgaacaggatgaaatttggcaatgctatcaacagcaaggactggaagccgcgttacagatgatcgatcggcaatcgcagcaatccgaacccagggaccgtttttacctgcaattgctcagcgcccagttactggaaaaagcggggatgacggcgctggcacagcagcactaccacaacctgttgcaggtggggcagcaagtgcagctaagcgaatgggaaccggcgttgatcgccttgctgacagacaagcagcggcagctcaagccgtgatggccagggaagggaacaggagcgttaacgcatgaaattgccctcatttattcattttgccagaccggccattccacgcatcaaagcctcggtgccggtggtgctggcgctgttggcctgtatcggcttgatttgggtctggatttacgggccggaatggaagctgaaggattaccaaccgttcgaacctttgctgagccgctggttggtgacggcattggtggtgctgctggcggtgtgctggctcaccttcaaaatggtgcggcgtttacagcagttggaaaagctgcagctgcaggctaaaacgcaggtcgacgatccgatcctggccgatatcgaacaacaggaccagtatctgggcgtctggaagcagcagttgcaacggcggctgaataccccggcttatctctatcgcctgccttggtacatggtgattggcacccgcaacagcggcaaaagcaccctgatcaaagaaggctacaagctgaccgaaatcgccagcccggaactgaccagcgtggaagacgccggtgagctgcgcgtgcgctgctggctgggtgaacaggcggtgctgatcgatccggcaggtgagctgatcgagcagccaacactgtccatcgtgggcaaagcggcgctcaatagccgcctgtggcaaagcctgctgaactggctggttgaacaccgtaaacgccagccgctgaacggcctgatcctcaccgtcgatctgcatcaactgctgacggcgaacaaggctcagcgcgaaaacatggttgccagcctccatcagcgtttgcaggatgtgcgccaggcgctgcatagccagctgccgctgtacgtggtgtttaccaaactggacctgctgtacgggtttgaagcgatgtaccagacgctggataaggctcagcgcgaagcggtgctgggggtgacattcagcctgaacgccgccgagccggaggtgtggcgcaaagagttgcagcagttctggcagcaatggatcgcccagttgaacggcgcaatgccagacatgatgctcaacggcgtcgatgcagggcaacgtagccaactgttcagctttacccgccagatgcagggcctgcaagagtatgtggtgcaactgctggaggggatcctctacagcggcgatcatcaacagccgctgttacgcggcatctacctgacatctgcccaacagcgcggacagatggatgacgtgtttacccagtctgccgccgtgcagtatcacctgtcaccgcaggccttcccaacctggccggtcgccgaaacgaccccgtatttcaccaaagagctgtttaatcaggtgttgctggcggaaccgaatctggcgggcgaaaacggcctgtggctgcgtaactccagaaaacgcctgatggtgttctcctgcgtgggggccgtggtggcgttgacgctgtggggttgctggcaatactactatcaaagcaactaccgtgccggacaagaggtccttgcccaggccaaaaccttcctctccatcccgacgccgaagggtgacgatcgctatggcaatctgcaactgccgttgctgaacccgatccgtgacgccacgctggcttacggcaactaccatgagcgcaacagcctgctggcggacatgggcctgtatcaaggcaacaacatcggcccttatgtggaaagcacctatctgcaactgttgcagcagcgctttgttccgacgttgatgagtggcctgttggagcagttgaatgcggcacctccaggtagcgaagagaaactcgagatcttgcgcgtgatgcgcatgctggaagacggcagtggccgcaatattgcgctggtggaacagtatatgggcgaccgctggagccagcagtttaacggccagcgcgaattgcaacagcagttgatgggccatctggactatgcgctcaagcacaccgattggcgtgccgcgcgggaaagtggcgatcaggttgccgtcaagaactttatcccttatcgccagccgatccagctggcacagcgcgagttgagcaagctgtcgatttatcagcgggtgtaccagaacctgcgcatcaaggcacaggacgcgctgcctccggccctgaacctgcgcgatcagatcggggccagctttgacgacatctttatctccaacaacgatcgcctgctggtggtgccgcagttcctgacgcgcaacggtttgcagaactacttcaccaagcagaatgaccaactggtcgatctgacggtgatggacagctgggtgctgaatctcagcaaaaacgtcgagtatagcgaggcggatcgcaaagagatccagcggcaggtgaccgagcagtatatcggtgactataccgctacctggcgtgcggcgatgaataacctgtcggtcggtgagtttgaagatctgccgcaggcgatcagcgccatcgagcaggtgatcagcggcgagcagcctttccgccgtgccttgcagacgctgagtgataacacccggttgcctgcggtgcctgacgcgttgcagggtaaagaacgccaggaactgatgcaaaaatccgattatcaactgctgggccgcgtcaaccgcgagttcgcgccagaaaccggcgtgctggtggagaacggtgacaaaggcagcgtgctgcaaagcgtctaccaaaaactgaccgaactgcaccgttacctgctggcgatccaaaactcaccggcaccgggtaaagcggccatgaaggcggtacagctgcgcctggatcaaaacagcagcgacccgatcttcgaggttcagcagttggcgaaaaacctgccggaaccgctgaaccgctgggtaggggatttggccgaacaagcctggcgcgtagtgatgatggaagccatccaatcgttggaagtcgagtggaacgagacggtggtgaaacagtatcagacctacctggctggccgttatccgttcgatcctaaatcgcagcaggacgtgccgctgagcgagtttgaacgcttcttcggcccgaaaggcaccctggatagcttctaccagcagaacctgaagccgttcgtggataacaacctgagcagcggcagcgacgggcaactgttaatccgcccagacgtgctgcaacagctgacgcaggcgcagaagatccgcgaaaccttcttctcggcacaaaacggcctgggcactcagttcgccatcgaaccggtggtactgagcggcaacaaacgccgcagcgtgctgaatctggatgggcagttgctggattacgcccatggccgcagcaacatggtgcatctggtttggcctaactccatgcgggccggggtagaaagcaaggtaacgctggtcccggatgaaaacggcaagtccccgcgcagcatcaccttcagcggcccttgggcacagctgcggctgatcaacgccggtgagttgaccaacgtcggcaccaactcgttcgatgtccgcttcaaggtggacggcggcgagatgacctaccgcatccatgtggatgagtccgacaacccgttcgctggcggtctgttcagcaagttcaccctgccagacacgctgtattaatcgttgttattccgtctctctgccgcgcttggcagagagacgctttaaggatgagtccgcatgagcgaagcctcagaaaatatcatcattcaaaccggcggcgatccgcgccattggccggagttcagcgccattcgtgaagagatcaacaagatcaaccacccggcacggccagaggttaactggcggctgattgagtcgctggcgttgacgctgttccgtaccaacggggtcgatctgcaaaccacggtgtactacgccctggcgcgtacccaaaggcacgggctggccgggtttaccgaaagctgcgagctgttggcgggcatggtcgttagccaatgggagcgactgtggccagagcagccccaggcacgctcggaaatactggagtggttcaacgcccgcgtcggtagccaactgcgccagcacgagttcggcattgacgacctgcgcttggtgtatcgcgccgagcgggcactgcaactgctgtgcgacaaactgcaacaggtcgagctaaagcgcgtaccgcgcattgaaaacctgctgtacctgatgcagaacaccgccaaacggctggaagccgcccatgaagcggccaaacagccgccagcgcaaccgctgaagatgccctcgatggtgtatctctcggtgcccgaagcggagccgatccgcaccctgttctcaggagcaaaaccggccgcgaatgaaccgcctccggcctatgaagaacccgtgccgccgccaaaagaacaaccgctgcccaatgtggaggtgcgttttgcaccgccaccaccggccatacccaaagcggccaaacgcgcgtcggcggcctggggatttggttgcggtgtgctgtgcagcctggtggtcgccggtgcggcttacctgatgcaggttaagccgatgcaggaacgattggcggggttgtccgccaccccagaaggttcggtgcagttgtggctggcccaacccactctggacggctacggccagcaattgaacaccctggaaaatctttctccgttggccgggttgcgtaccgccgatgcctcggtggcgctggccaaccaactgtggccgaccgatccggagcagattgcccaaagccaacgttggcaacggctgctacaggcgcgactcggcagcgagcgggccgacaacagctatttccaggtgcagcagcgcttgcaggcgctgtcggacaagctgcttgaacaggaacaaacgcgcggcagcctgacgctttcctatctgaaaacgcaggtttatcagatgcaaagtgaactgaaccgtgaaacgccgctggaagagttgctgcggcagttggcggtttcggtggaacaacaacaaccggcttcaccggtgctgctcaagcagatagacgagcgctggaatgcactgctcagtcgctatcaccaactcacgcagcaggcagcatctgcccgctaacctccaggaaggaaaagatatgtttgctgatgacaagaaaaacgcccccaaggggggcgtgcagccgaagaacattgtggccacggagacgccgtcagtcagtggcgatcaggtggtggatatggtgggagccgcggctggcgcagtaggcggcaaggcgggcaaggtggtatcgcaggcggcggatattgccaaaaaggccggttcgatagcctcatccataggcatcaatccaaagaatattgtcagcggggggagcgcagcgggcatcgcctcatccgcaggtgtgaagccgatgaacattgtcagcagtggtagtgctgcgggcatggcttcatctgcgggcgtgaagccgatgaactttgccagcggcggcagcgccacggcgatggcgtcctcggctgccagtgccctgatgggcggcgcggaaccgagcgggttgcagtttacgctctccacggggaacctgcctccgcagacctttgtggtggtggatttcagcctgaccgagatgctttcctcaccgttcgtgctgaacgtaggcctggccagtgccgatccggccatcgactttgccgcggtgctggatgaggatgcgacgctggagatcaagcgtgaaggggtgttgcaacgcagcatcaccggcatggtggcgagctttgaacagggcgataccggcctgcaccagactcgttacagcatggtgatccgcccggcactgtggcgcaccacgctgcggcgcaactcgcgtatcttccagcagcagagcattgaaagcatcatcaccaccttgctgaaagagaacggcatcaccgattttgcctttggcttgcgtaacccccatccggcccgtgagttctgcgtgcagtaccaggaatcggattttgacttcatccagcggctggccgccgaagaggggatgttctactacttcgaataccccgaaggcaaaaacatcgtggtgtataccgatgacgtaggcaccctaccgcagggcgctgtgctgccgtataacccgggcgtagcctcacaggcactggagctgtgcgtcaccaccttcacccgcagcgcgcaggtgcgcactgccgtggtggagctgaaggattacacctttaaaaacccgcagtggtcggcggcctttaatgagcaggccagcgaactgcaaaaccaacgaccagactacgaacacttcgacttccccgggcgtttcaaagacgaacagcacggcaaggcctttacccattaccgcctggaagccctgcgcaacgatgccaatctgggaaatgggcagagtaacgactttaccctacagccgggccttctgtttacgctgatcagccacccgcgtggtgatttgaaccaccagtggcaattgctgagcattcagcacagcggcagccaacctcaggcgctggaacaggaatctggtgggcaaggcaccacgctgagcaaccagttcgtcttcctgccgcacacccaaacctggcgaccgacgccgatgccgaaaccggcaatggacggcccgcagatcgctatggtggtgggtccagccggggaagaaatctactgtgatgagttcggccgtatccgcctgcaattcctgtgggaccgctacggtaaaagcaacgacaacagctcgtgctggatccgcgtgacccagccgtgggccgggcagggctgggggatgctggccatcccacgtatcggccaggaagtggtggtggatttcctgcatggggatccggaccagccgatcgtcaccgggcgtacctatcacgccaacaatatcccgccgggatcgctgccggccagcaagacccagatggctttccgttccaagacccacaagggcgagggcttcaacgagttgcggttcgaggatgccaagggcggcgaggggctgtttatgcatgcccagaaggatatgagtacgacggttaaaaacgatcagtctcttaccgtcgaatcaggtaaccggacgctaaatattcttgctggtaacgaaaccaaaaccgtaaagcagggaggcctgacggaaaccatttgtaccatgcgtagcaccagtgctaatcaggttcaggtcaaagctaaagcaggtaagagtggcccaggaacacagctttatgagtcctcagacgacatcacgctgaaagtgggggctggggaaataaagatgacgaccagcagcataaagattacatttggtggttcgtgcatacagctggatgccggtggggtatacgttgatggggcagttgttcatttgaacaaaggcagttctggtggtgctgctgcagcggtgtctgaagccgaagaggcagttgccagtgcggcaggtgttgcagcaactggcgctgtagggggggctgcatctgggcctgcggctccagctgcaggagctagtggagccgcaggggcgagcaaaccagcaaatgggaaaggggattctatttttacaccagaagttaatagtctcacagcgaaatcccctacattgacgaaggacttgaaaacacttaaagatgatggctggagtattaagcccggtgaggcaggaaaaggtagttatgcttctagagacaagaaagaaataattgttgatagaaatgagttaggaaaacctgaattggttacgcaaactttagcccatgaagcaggccatgctctttatacgccaacttatgatacctcatccagagaggcatatttaaacagtacattgtcagatgaaggagccgcgactttaaaaaatgttgaggtaagacgcgaagttctgaagggaggtggcgctgatattggtattgcaggtaatagtgctaatcaacccgcctacaattcggcatatgatgcgtaccttaaggatggtaatgcgaagaaatcgcgtgaagctattggtagagtgtttggtaaaggagaacatacctcaacaacaggagagtcctacgaggattactatggaggatggtatgataaaaattacccagctaaaaaatagcattgtaactctattgttattaaccacattctcatgtcatgcaacacggagtgaagaaatggactcaataaatttttggcgatttgttaacagtgtcaaggtacaattaccagagggccttgcgcagatagctcatttttttaatggtgcttttgtcgtagaggatgaaaatgatgtgtttatatcttacaagaataaaaatttcatgcttgatggtaaagtaaatattgaaaacattggggcgaaggtgttccgcaaaaataataagaatgctccctatttactcaccttgcaagttagcggtatttgcatcactttacctgaggtaaaacaacactattctgacctgacgatcactgatgtgcctcgcgggcgctcattggaagaggaaacatcatacactactgtaagatatagtaataacgttaagttatcatttggttttgcggaaaaaaaaccagattgcttgcgtagtatcgtgtttagtgttgaacaacattaattgtgctgatgattgcttcccccttcttgattttttattttcgttgaggagggggaatgttaggggggtaagttttgttgatgcagtaatagaggattgaggtattgctgacttgtcttttttacttcactcccttggtgttaatgattgtatctttcatgataatttaatgtgtttttagagaactgacaaaataaggacatgaagaaatgactgcatctggtgaatgttccatttttcaatttaacgagggggctattgagctacctacagcttggaaagatctcagtgtgctggtgctcagtgcagccgataacgaccaaagcggaatcagttttaccatctctagagacgttattccatggggaatgtccttcagtcagtttgctgagcgtgagatatccagcctgtcaaaacagttgaaaaattaccagcagattaatcaagagaatggggtgttagattcccgagatacggcaacgtctgaatttagttggtcatcaccacaggggccgatccatcaattaatgatgttgcttgatgtcactcctaaagtgttggttttcactgccacgatcccaggagatatgacggatgaacagcggcaacaaataaccacgttgatgagtacattccaattgcgggaatcggccacggcagaaaaaacggctacaaagtaacaggagcggacgatgagtgttgcacaaggagtatggtcaggcgcaggtgctgctggcgggcgctctgccgttcgtcaagaggtgatggaacaacagcgtggggcatcaccaccgaatactaacgaaggcggcgcggagtcttttaacgaacaagctctgaactttatggagagcgaagaagtaaacagtgcggtgactgtcggtatgggagcttatgccgtcgcgagtggtgcaggggcacctttcgccgtcgggctagctgctggttacgttggcgcacaagcgggtagctatgtcggcgaaaaagcaggtacagccattgccgagtaccttggatggaaaaaggtggcaacggagggagatgctccggcgcgtatgggggactttattgcgcaccaaaagaaagacctcggcacctggggggcattaggcggaatattgctcggagcggttgctgccgttgctgtgggggcattggtggttgctaccggtggcgctgctctggttgttgttgcagccgcagcagccgcagggggatttgttggtgctggtgtcgccgcagctggcgcagtgatggggcaatacggcgataacaaaggcacgattatcgacggttcccccaacgtgtattttgaagggaagaaggtggctcgggtaggcgatcctatcgtgtgtagcgatcatccaggtcctccgccggttatcgcggaaggggcgaaaacggtctacgccaatggcaaacaaattgcccgtttagggcaccgtaccacttgtgatgctaacatcaatagcgctgcggcaaccattgttgaaaccacagaaacggcacagattttcaaagttaaagatagccgaaactcagccctgcgctgggtgactatagtcgccagttatctaccgatacccagagggaagaaaaagggtagcaaaccaaaaacctcttctgaagctgaaggttgcagtaataacaaatgcaccaaacccggtgagcctgtggatgcggcaacgggggattttctccaagtgtggccgatgatcgatattccgggaatattgccactgacgcttacccgactctatcgttccagtggtcacttgactggcagttttggcgataaatgggcagatgattggtctcagcatttgatccttgaagacgcggtcattcgttttcgcaaccatgaaggtgtactgctgacatacgatgcaccacaagacgatgatgacgttcaggctatcaatctgcacgaaggtcattatctgctctatggccaacgtagtggtgtattgcatatttttaaccgacaaacacaacagatcctgagctttgccgaatcgcaggggaatgttcgccgcttgtctaccatcagcgatcgtttcggtaatcaaattcgttttcgctattctgatgaacggcagctttcacgcattgatcatagcgacggttattcacttgaactcagttatcagcaacaacaattgcttgcgattgaattgattacaccggttcaacgtcaatggctggttaaatgctgttatgctgccacaggtcttttggctgaatgtaatactttccagtttacccacctttatcatgagtataatgctgccggtcacatgacccgctggcatgatactgataagactgacgcttatattctctatgatccgcttggccgagtactgtccacacgtaccgcgagcgggcattaccaagatagctttatctatgatgatgtcgcccaatgtacaacctatctggatgcggaaggaggatgcacccgtttttggtataacagtgatggtcaggtgacccgtgaaattgacccgctggggcgcgaacgtttgactgaatgggcgttcggcaacaaactttctgaaacggatgccctgggacgcaaggtagagttccagcttaatcagtatggcgaaacagagcagattacgacccctacgggtgaaatatatcgctatgagtacaatggttttgggcaggtcacgaatagcaccttaccggatggtaaaggttggcaatttatctatggtgatgaaggacaactttgcaatgttgttgatccgcagggtttacggcaagaatatcgttatggcgagttgggggcattagtacgtcagatcctgcctaacggggcagagtggcgttacagttacaatacgcagcatcaagtcagtgagattatcgcgcctgatggcggtgttacgctattaaatcaggacatctttggccgcttaaaagatagccaagatccattagggcacatcacccgttatgcttatagtcctcagcatgccagcccgacaggcagtgtcagtcagatttatttgcctgatggcattaagcaggtgatcacctatgacagtgaaaaacgcattgcggcaatgaccgatggcgcaggaaagactacccgttatgaatacggtggttttgatttgctgacaggccttattcgtcctgatgggcagaaattgacatttagctatgacaagttaacccgtcttgatggcgtcaccaatgcactaggtgaaacttaccgctatacgcgtgatttggccggacaggtcattgcggaaaccgattttaccgggcgtaccattcaatatcaatacgatgctgtggggcgacgcatttgggcgcgttaccccgatcgtcgcgtgatcagttggcaatactcgtcgcgtgatcaggtcttggttcaacagacatggcgcagtgataaattgagttccacgctggtcgcaacggtgagttatagctacgacgaacaggggcgcttactaaaagctgaaaatgcagaagccgttgttgagttcgattatgatgatgctggccaactgattgccgagcgcttgaatggacgagagattaagcatcagtgggacacgctaaacggcacgccaagttctcggttggttggcgagctcgggcttgattttgactacggtcttcagggggaactgacacagttaacgcttgctggccatcagccattacatttccgacacgacaagctaggccgggaaaccgtgcgagagagtgctgcaggatttatccaagcctgcaattatacctctgtaggattgctggccaaccaggcggcaggacgcaactcgtccttgttccagcagcaattagtgacaccagattcgatgacacctgcgttgcatggtagtgcagtcaaccgcagttggcagtatgatcgggcctataacgtggtgggtattgatgatgggcgttggggtaagacgcagtatcaatatgatctcaatgaccagatagttcgagctaattttggtggcgttttgccgctcattgagcagtttacctacgacgctaacctgaacgtcacattgcatgctcgtatgccacgtggggctgaggctgctttacagcaagaccaacaacatcagcgggcaggccgtgtcgtatcccgtggtaactgccaatatcattacgatatgggtggaaggttggttgaaaaacgagtgcttaaagaaggatttcggccgcaggtgtggcgctaccgctggaatgaacaggatcagttagcggaattgatgacgccgaaaggtgaacgttggcgctatggctatgatgcttttgggcggcgaatccgaaaactacggttagttgacagcaagccatttagttcaacgttgtttgatttgcctgaaccagctactcgaccagctagcgctgtggtgcaaggttatgagtacctgtggagtggtgatcaactgatagaggaagcccctatctatgccgatggcaccgttgcctacgagcagagtatccactggttgtatactcctggttcgttagcaccggtggcccgctatgaacagggcaaactccattatgtcgtcgccgatcacttgggtactccacgtgaattgctcaacgaacaggggaagatggtctgggcagatcgtttgagtacctggggtaaaaccgagttgtggcaacaagcggccaacgacgaagataaggtcacctgcaatctacggtttgcgggtcagtatgcggatgccgagtctgggttgcattataaccgttatcgctattatgatgtggataccgggcagtacttgtgtccagacccgatagggctggcggggggagttaacccgtatgcatatgtgccaaaccctctatctgcaatagatcctcttggtcttgctacgtgtcctgtgactaagcaaagggttctggataatattgctgcgagtaaggcggcgagagatgcatctaaattccctacgaagaaaattcctgaatatgatccccggattaggaaaagagcggttgaagatcctcgtggacatcatttcccgttcagtttcgataaaacaatcttgaatacttctcctactataattcgaggtggggctgaaggttatgctgttcgtggttataaaaatggtaaagaggttatatataatattattgtgaaaaacggtgttattaatcatagagatatgattgacgttacaaaatggggacaacggagtaaaagttttggttggcctattgatattaacgacataccgaaatttgttaactaaaggttgactaaaaatgttaaatttaattataagttgtgaggaaagtgggtgtttaagccttgattcatttatcttagaagatgattttttcaaggctaatgcagtagttaagtcagattggtatgaagctaaggcatccctttatgtctcgaaagaaagaatagatgagctagtttcagatttagaaaaaatgtctcatgagaataataacgaagttgcctttattaatgaagatgggaattttgagatgaatttttctatagaccatctaggtaaagtaaggattactggtgtattaattaaaagtatgatggactcatcttctctaaattatgaactatactcagacttacaatctataatggatttttgtgggcaactgaaagccatagcaaatcaataggttgatgaggttgaaattgtgatatttaaagccgaaaagctcctccttggatctttccggcttttttatcatggctacgccaacatattaccttgctgcacccgaatgaccaccttgccgggcattacgctgatcgccagcggttgcccggcaaggccgcactccgtcagccagtcccctgccagatacagttcagcgctatcccgtacccagtctgcaccaatatgggaatgtgcgtctacttccaataataaccgctcaatctctgcctcatcagaaaccaacgttattatcagcccatcctgatacggttctatcttaaataccgcccccggtgtaaaccccgccttgataatatcct

SEQ ID NO: 332 - DNA, 64679 bp, unknown
  Altogen  635822 strain
  misc_feature (57717)..(57747): n is a, c, g, or t
agccccgtccgttccgccacttaattgataagccctgagtctctgactcagggctttttcatttgcttaaattaaactcatcaacgactaattcctgcctcaattagcgtcaatttctgattattgttgcctgctaatcaaaagtcttatgcacaatagggcgtttttgatcaacaaaactgctgccataatcctctcaagctgttttgataaacaaaccgagagaacacaattatgagcatccctgcatttggcttaggtaccttccgtctacaagatcaagtggtgatcgattccgttagcaccgctctggaactgggctaccgtgccatcgacaccgcacaaatctatgagaacgaagcggccgtcggccaagctatcgcagccagtggcgtgaaacgtgaagagctatttatcactaccaaaatctggatcgccaacctgggcaaagaccaactgatccctagcctgcaagaaagcctgaaaaagctgcaaacctcctatgtggatctgaccttgatccactggccgtcaccgaacgatgaagtctcggttgccgagtctatggcggagttggtgaaggctaaggaactcggactgacgcgtcagattggtatttccaacttcaccgttgaactgatgcagcgcgctattgatgcggtgggggctgatgcgattgccaccaaccaaatcgaactctcaccgtatctgcaaaaccgtcaggtggttgaatttgcgcaacagcatggcattgctatcacttcctatatgacgttggcttatggcaaggcgttgcaggatgaagtcatcaacaatatcgccaagcgccgtgacgtgaccgccgctcaggtgatcctggcttgggctatgcaactgggatatgcggtgatcccgtcttcgaccaagcgtgaaaatctggcaagcaacctgttggctcagcaattgacgctgtctgatgatgaaatggcggcggttgcagcattggaatgcaatggtcgcctggttagtccggaaggtctggcaccaaactgggattgataggttggccgtctgtggttttgaggccacagacggcttagctgattttaacgaacgatcttttggtgcagggcgataatctctcggcccatttccatcagcataatcgcgttcatcagatggtcctgtgcatggaccatcaccagatgaaccggaattttaccgctgccttcgtccatttcgatcagtttggtttgtacctgatgagcgccagagagtgcctcctgcgcttgttgcatatactgttcggcctgaacgaaatcttcttcttcgcgcgcacagcgcatggcttgaaacaccagactgcgggcgtaacccgcattggcaatcagctccatcacttcgttttccaaatccatattaggcttcctcaatcagcgccagggcttgatccaataccttgtcacccttcatggtgccgtaggccatcatatcgatgcaggcgacttttttatggtgctcgtgggcaatcttctcgcactctgccagcttatagcggatctgcggccccagcagtgcgacgtcaaattcggttaccgccgttttgtattcacggatcgacttggcgcagatctcggcgtcaatgccacgcgctttggctgcttcttgcatctttttcaccagcagactggtggacatacccaagtcacacactaacaggatctttttcatgttatttctccaggcgttccagcaaatgctggattaaaagtgggatcggtcggccagaggccacgctacggccattttcgcgccacaacgcagtgccgctgatatcaaggtgtgcccagggaatattcgccgggctgaaacgactcaggaagtaggcggcggaggtactgatcgccgcattgttggtcggcgtgttacacaggtcggcaatatgactctccacctgtttgctgaagcgatcgtccaacggcaacgaccacagaggatcgccactgcgcaagcctgcctgagtgagatcgtgacgcaggttttcatcctcggtcatcatgccactaagatcgtaacccaaggccttgaccaccgcgccggtgagcgtagccagatcgatcacgtattcaggtggccgctgattattggtcaacctgctggcgtaggcgatgccatccgccagcaccagtcgcccctcggcatcggtgttgttgatttccacggttaagccgctgtagctggttgcgacatctccagggcgcatcgctgccgggccaatcatattttcggccagcgccagtacgccaaccagactgaccggcagcttgagttctgccacggccagcatcaggccaaagacgttagctgcgccgcacatgtcatatttcatggtgtacatgccatcgccgccctttagccacaggccaccggtatcgaaagtgatacctttgcccacgtaggcgctgaaggggccagtgacgctcccctggtaacgtatcaccaccagacgcggaggattatcggcacctttacctacggcctgtagcaagcccagaccttgttcagcgatctgctgttcatccaacacttcgcagctcaggctaggatagggggcaatctggcgggcgatctcgctggcaaagaatgccggggtgcagcgatcgcttggcgtgtcggcaatgcgtcgtgctgccttcatccctatggcggtggcagttgcttgagacaggcgtggctcgagagtggctcgctgctccggctggcaatagaacaccaactcctggatacgcggtgtgggtgacgcttctgcctttttcagcccgagatcgctcagttggtaatccaggttgaacaggaaatgcagcagagggttcagtgccggcaggctgcggtgatcaaacgccgtgcagtcgacaatcaactgcgtactagtaccactgcgtagtagaggacgcagtgcggtgaccagcttacgggtttgcccatcgaaccagaacgtttttggcaacagcgtgacgcggcctgccggagcacagccataggcgcagtcggcggtttgctgctgggcggtggcatggagttcctgtaacagggctgcattgcagggtaattgcagtgggctgccggggtagctaatcacatggctgttaactccccatgcggggatttcactctgtaaccgatatttaatcaaaatggatctcctcaatcggcgcgcgaatgcgctcggcatagtcggctagccattgctcgctggctggggtgtagtgggtatgctcggcgcggcgttctgccaggtacaccgttggtggctggatagcgctggcgaccacaaacgagaaagttttgatattggtagaaataccgaactccccttgccgattcatacagactacggagagatcgcccacccggccaaagcgggctatcagccgatcttccaactcgaagacgaccgaatcggccgcctgttgtggcgtcataccttgctgcatacgacgcacgatctcatagctggtgcagcctttcatcaggtcttcacccacgcccgtggcggttgcggcgccgatctggctgtcacagtagaaaccggaaccaatcaccggtgaatcacccaggcggccacgacgtttcataaacaacccgctggtagacgtggccacgctcattgaaccatgcagatcgaggccgataatgccgacggtatcgtggccatcgtaggggctaaggcccttatcgatggtttcgcggcagcgcttacgatagtgctgggttgcacgctcggtgagcatggtcttatcggcaaaaccctggctaagggcccactcacgtgcgccagctcccaccaggacgctgttgaagcgttcgcggctcagcgcctgggcaaccttcaccgggttagcgatatccaccaggttgccaacggcaccaaaggccagcgtatcaccatccataaaggccgcatccagttctacctcaccattttcggtaggtagaccaccgtaaccgacagatttataaaacggaaaatcctccacttccgccaccgcgctaaccacgctttgtgtggcgcttgccccggctttcagcgcttcactggcctgggtgacgccttccagtgccatacgccaggttgcaatcattccccacatatcaaactcctgatgtttcggctgcgcgatactgtttgtccagaatgcgcaggaaaggcagataaagcatggcaccgatcagcaggttaacgatctgcatcaggctgccactcaaatggccggtcacgataaagccactgatcaccggcggcagcgtccaggggataaacaccccggtagtgacggcgacggcccccaccttcatcgccacgtattgcacggtaaccaacaccaccggcaccaggttgaaggggatcagcatgatggggttcatgataactggcaggccaaacaggatcggttcattaatgttgaagattgaagccgcggcccccatgcggcctacttcgcgaatactattgctacgggcaaagaacagaatggcgatcaccagcgacagggtggcaccagcaccgcccatccagaccatatcgaagaactgttcggtgacgatgtgcggtggcgtgaccccggcctggatagcggcgatgttgtcggtctggttttccatccacagcgggcggatgatgccgttgaccatcgaaccagagttgatccccaccgaccataggatggtgatactcaacaccgtcagcagagcgccaatataggaagtgccaaagtgacgtactggcgtggcgactacgttataaataaactgatgaatggtttggtagctggtgtgttcgaacagaatacggatcgccagcaccagaatgatcacgaacagtgcaggcagcagagcggcgaaggattcctgtaccgcaggtggcacgccttcgggcattttgatgattagcttgcggcgcttgaggtagcagaacagttcggtccacagcagtgagccgatcatcgccacaaacagccccttgctgccgatccactcggtcgggatcacattgatattgcccaaggcttctaccttgataaacggcgtgaggatcaggaagcataccagcgacagaataccgctggagacgcgatcctcatcataatgttccgccaggcggtaagcggtaaggaaactgacgaacagcgacatggtggagaacaccgcgttgaacgggatctcgatgatattgctccagctggcaccaaacaggcccgccataaactgctggtaaccctgattggggaacgatgagatcaccagcaggatcgagccgacgataatgaacggcataaaggaaacataggcaccgcgaatggcacacaaatgcctctgctgtgcggccttggccgccagaggcatcagcttggcttcaagaaatcccagagcgttgttcatggtaaaccccataggtatgcgtattggaggaaacaggtaagggtggcgacttattggctgggattatcagtgaatggattttaaagaaaggtgaatcagttcacagtgtgaggtgaatttataaaatatctcacaagattagttatgatgaggcatcaattttagtgtggaatctacgatggaaatcaagctacatgccaatgcgaccactaccccacgagtacggcgttatatccagcaatcggataaaagcgatcgcgtattggcgcaggagctgggtatttccgtggcgacggtacgccgttggcggcagcgccaggatgtcgccgatcgccatacggtgcccaagagccttcgcaaggcactgacagacgaacagagtttgcttatcaactggctgagacaaaaattacagctgccgctggatgagctgctggtggtggtggttcagggtatgcaacagccgatctcccgtgcgggcttggatcgctatctgcgcggtgtgggccagcgtagtgaggcagaaaatagggcgctacgaggtaaaaaggcggtaaaagcgggtgaactgccgggaactctcgctcttttttatcaacgaattagcctatcggccgaagatggcggcgagcaacacctcttgtgggccgaagagaaggtcagcggctggctgagtgcacgagcctttgcgggagcctcgccgatgctggtggtcaactggctgaaggaactgttaccgcactgcccaggtgatatacaatctattgagactgaaaataaaaagctgttcggcaatagcgagtctcaggcccatcccttacagctatggtgtcgggagcaggggataaggttgcaacaacccgcgctaccgcaaatggagattgtgctgcggctcgaaagccaactggcggacctgttaccagtagcggagaactcttcgctggatgttgtgctgcaggcgatctgtgccagctataaccaatactggccacagaagaagttgggcagccttacgcctgccgcattctggttacaacatcggccagatggttagcggggagtcaggttttcactaagaaagtcaataaagctgcgtaggcggttgcttacggcgctgtcgctgtaataaaccgcattgaccggcacggcaaccggcagtgtctccttgaccaggatctgcactaaatccccacgctggatatcctcatcgatcatgaagttcgacaggcaggcgataccgttgccatgtaggcaaaggtggcgctgtgtttctccgctgttggtggtcaaccccggagtgatctccaactgccggccatcggcgcaggctaatggccagcggttcaggttgggcagatcgttgaagccgatgcagcagtgttgcgccagatcctccacgctttgcggggtaccgaactgctgcagataggctggtgacgtcacaatttttcgatagctggtcatcagtttgcgggccttcaaacttgagtctgtcagttcccccacgcggatggcaatgtcgaccttgcgctcaatcaggttgataaaggtttctgacgagactagcgagagcgacatttccgggtagcgggcacgaaactcgccaaccaatggggtcagtacgtgcaacacgaccggcgttgcggcatccacgcgcaacaggccctggggccgctggcggctctccatcagcgcattttccgccgcggccatatcgctcaggactttctgcacctggcggaaatagttttctccctcctgcgtcaggcttatctggcgggtggtgcgattgagcagcgtgacccccagcttgctctccagcttttttaccgtacggctgaccaccgagtttgcctgttccaagtgctccgccgcgcggctgaagctaccgcattccaccacggtgacaaaggtgatcagttcatccgaatttgccttcattgttgctccatcagcaaaatttatttgaaattttgagcatttttatcatttaagcacaggcagataatcaccgctatcaacccgaacgctattttggagttagcaatgcctctcgctttacttgccttgaccatcagtgcctatgccatcggcaccacggagtttgtgattgtcggattgatcccgaccatcgccgagcagttgaacgtcactgtgccctctgcaggggtgctggtgaccctttatgccattggggtggcgatcggtgctccggtactgactgcattaaccggccgagtgccgcgcaagatgctgctggtgggcttaatggtgctgttcacccttggcaatctgctggcctggcagtcaccgagctatgagtcactggtggttgctcgtttactgactggcctggcacacggggtgtttttctcagtgggttcaaccattgcgactagcctggtagccaaagagaaggcggcaacggccatcgccatcatgtttggtggcttgaccgttgcgctggtgaccggcgtgccgctaggcacatttatcggccagcacttcggctggcgtgagaccttcctggcggtgtcgttgattggaatggtggcgattattgccagcctgatcctgatcccgaacaacatcaagaaccaggccagtgccagcatccgcgatcagctgcaagtgctgactcacccgcgcttgctgctgatttacgccgtgaccgcattgggctacggcggggtatttacgacctttaccttcctggcaccgatgatgcaggagctggctggtttttcggctccggccgtcagttggattttgctggcctatggcattgcggtagccatcggtaacatctgggggggcaagctggccgaccgtcatggcgcggtacgtgcattgagctttatctttgccgcgttagccgccttgctgttggtgtttcagtttaccgccagccacagcgtcgctgcgctgctgacggtggtggtaatgggggtatttgcctttggcaatgtgccaggcttgcaggtttatgtggtgcagaaggctgagcagtacacgccgaacgcggtagacgttgcttctggcctgaatattgcggctttcaacgtggggatcgcactgggatcagtgattggtggacagaccgtagcctcactagggttggcgcaaacgccttggatcggcgcgctgattgtggtgggggcgttgttgttgatcggccttagtggccgtttggataaacgctaccaacagcagttcgcctgatcccatctagcccctttcttcttggcccgcattagtgggccttttcgcattcagcgcgaacctttacagacacatacacagcattgattgaaatcggcccgccttgcccctataactggatctctaaaagccatgttggcagagccgctcaggcgtatactcaatttagtcttggtagccatgttgctatcaacgtgattttcatccgaacgggaaataggcgaataacgtgccgaaacgaacttatgcaatgaggtatgttgcgggccagccagttgaacggattttccctggtgccatcaatcagccgctaccgccgggggctgcgttgcctacgtctggtgcgctgcgggtgatggtatggaatattttcaaacagcagcgtgccgattggctttcggtgttgaaagacttcggtaaagatgcgcagctggtgctattgcaggaggcgcagaccacgccggaattggtcagctttgccacctctaactatctggcggccgatcaggtgcccgcctttgtgttgccgcaacacccttccggtgtgatgacgctggcggccgcacatccggtgtattgttgcccgttgcgcgagcgggagccgctgctgcgtttggccaagtcggcgttgatcaccgtctatcctttattagatggtcaactgttgatggtcgtgaatatccacgcggtgaactttagtctgggagtggatgtttacagcaagcagcttggcccgattggtgagcagatcgccctccatcgggggccggtgatcatggcgggggattttaatgcctggagtcgcaagcgcatcaacgccctgtatcaatttgccagcgatatggcgttgcacgaggtcaacttcgccgacgatcatcgccgcaaagcctttggccgtccgttggattttatcttttaccgcaacctgggcgttacagaggcctcggtgctggtgactcaggcctcagaccacaatccgctgctggtggagttccattcgcaaaccgataaaccggtctggtagcgaaatttggccaataaaaaagcatcccgagggatgctttttttgtagcgaaaacttaggtttccggcgacgatttgttgctgacaaacagcgtcagcttcacaccgggttgcagactgctgcctttgccgagcgttgagttccaacgcatcacgtcgttaatttcgacgccgtgacgacgtgcaatgctggatagcgaatcacctttacgtacttggtaggtgatgctgctgttatctctggcattgctggccacttgcagggtttgcccaactttcagcgtgctcttgccacgcaaattgttccaactctgcaaatcgctggtcttaacgttcaaccgtttggcgatggtggataacgtatcgccggagcgaaccttatacgcacttccgcctgacaggccgctgttcttcgccaactgggtggttggtaatgtcgcagctatctgtccgtcggccaacgagtctttcaactgtgcggcattctttttgggaaccatgatgtaatggggcccattaggtgccgtaacgcctttcttgtagccagggttataagccttcatcttggtgagagaaagcccagacatctctgccgcctgagtcagctggatctgctgcccgacatcaatacgcgccagtgcacgggtttcgtcagtttttggcaacttgacgccgtactttttgctgtgcttgatgatatcgctcagtgccagcattttcgggacatagattgacgtttcacgcggaagcgacaatgcccagaactcggtggacttaccctgacgtttattcgccttaaccgcctgcatgactcggccttcaccactgttataagcagcgacggtcaataaccagtcaccgtcaaacatgcggttcaaacgctccatcatgttaagcgcagcggtcgtcgaggccacaacatcacggcgcccgtcataccactgattgtttttcaaaccataattgcgacccgtttgcggcacgatctgccatagccctgcggcattggcacttgacgtggcgtgagggtcaaaagcgctctccactatgggtagcagtaccagttccatcggcatattgcgtttcttaatctgcccgactatccagtacatgtacggctctgcccgtaatgttacatcgtggagatagctcttactttttaaatattttcttttctgttcacggatccggtcgttttccggaacctccatcttcagctcgtcgctaatgaagttccacaggttctgctgagcggcgctactgttactgtctagccaccgtgccgaactcgctgtgtactctcctgcttcactttcttgacctgccgaagacagactctgtgcatgttgctttggtgccggtacatcctgccaggatgactggcaaccaaccaacaagaccgaggcgagaagtatcgctttagccttcatgtgtgtgtcaatatagttgcttaaaagacgagcaaggatactttgcttcgccaaaaaacacaactaaaagcttagaaggcatccttgcgcaggcgtaattcggaaaaaaccgaatgaagctggctcggtggcgaattaaagcctatttccttttgtaaatcagtgtcatggcagcgtaaaaatagattaattttacgctctaattgcaacgttgtgggcacgctgggtacgccttttgcccttgattgctcaatttgttgctgatatgtttcaatttggcggtcttgcggcaaaattgtcctggcaaacttaaggtttgagagcgtgtactcatgtgcgcaacaaattagggtttcgtcgggaagttgcgcgagccgttgaaatgagtggtacatttgttctgcagtcccttcaaaaagccgtccgcagcccgctgaaaaaagcgtatctccacagaaaagataaggtgcactgtagaatgctacgtgtcccagggtatgccctggaaccgcgatggtagtgtagctacgcccaccaatttccaggatatcgccatcctgaaccaaccgatttgctcccttattggcggtttcctgggggccatacaccggcagatccggatattgcgcaacgatttccgctacgccgccgacatggtcgtggtggtggtgggtcaataatatggcgtcgggggtcagttgccgttgggacaacgccgccaataccgggccagcttcgccgggatcgacgatcacgcatcgcccttgctggttagccaataaccaaatgtaattgtcctgaaaagcgggaatgctgataagattcatggaacacctctcgttggcaatggcttgaaagagatactaaaccatgaaaccagcccagactctagaaaagctcactagcccttactcctgggccgggttgccgtggggcgaatactatcgtgaggggttggagcagcagttgcagccctggtggcccaagatgtttggtttccatctgttgaagatcggcaatctcagcgccgagttggatagcgaaaagtgcgccatttcgcatcaggttaacgtgggattggccggggataacctgcatgttcaggccgatccttatcaactgccctttgcagccaagtccgtcgatgcctgcctgttggcccatacgctctcttatgccgatgacccacaccgtatgttgcgtgaggtcgatcgcgtcatgattgacgatggctggctggtgatcagcggtttcaatccttttagcctgctaggtctggggaagctgatcccccgattgcgcaaacaccagccttacgtcagccggatgtttacccagatgcgcctgttggactggctcagcctgcttaattatgaggtgttggatcagacgcgcttccatgtattgccttggcagcgcaagggagggactttcttgagtacgcatttaccggcgcttggctgtatgagcgtgattgtagcccgcaagcgaaccttgccgctgacgccaacgccgatgaaagtgggggcgaggaaacactctctcagccgcgcagtgggcgcgaccaagagttatcgcaaactgccttaagcttcgggcttgtagccaacgtcgtcctgcgttgggctgcctgccgcatcacgtgccaacacgtcacaacgttcgttttccgggtggccggcatggcctttgacccattcccaacggatggtatggcgggcaatcgccagatcgaggcgctgccagagatcgacgtttttcaccggttttttgtcggcggttttccagccgcgctttttccagttgtggatccaactggtgatcccttggcggacgtattggctatcggtgctcagcaccacttcgcagggggtggtcaaggcttcgagcgccacaatggcggccatcagctccatgcggttattggtcgtcaggtaataacccgcgctgaacagtttctcgtgctgtttataacgcaaaattgcgccgtaaccgccggggcctggattaccaaggcaagagccgtcggtgaaaatttctacctgtttaagcatctctggtagactcttcctatcagttttataaaaaccaagtctgacataaaccagcgccatgagcacagcattatgatctctacaccaaccagacagatcgttctcgataccgaaaccaccggtatgaacaagctaggggttcactacgaaggccaccgcatcattgagatcggggccgttgaggtgatcaaccgtcgcctgaccgggcgccatttccacgtttacgtcaagccggatcggctggtggatccggaagcctatggcgtacacggtatcagcgatgagttcctggcggataagcctactttcgatcagatcgccgctgaatttatcgactttatccgtggtggcgaattagtcattcataacgcagcgttcgatatcggctttatggatcacgagttccgtatgttgcagcgagatatcccgaagacggagaccttctgcaccattaccgacagcctgttgatggcgcgccgcctgtttccaggcaagcgtaacaacctcgatgcgctgtgcaaccgttatgagatagacaacaccaagcgaacgctgcacggcgctttgctcgatgccgagatcctggcggaagtctatctggcgatgaccggtggccagacctcgatggctttccagatggagggggatacccagcagacggattcagcccaggatatccaacgcatccaacgcccggctacggcgatgaaagtgatctatgccagtgacgcagaattgcaggctcacgaatcacgtctggatctggtgcaaaagaagggcggtagttgcctgtggcgtggtggcgcagcagccgaataacagcctctcgggatagaaatgacgcctaagcggcataattaacgcgtgttcgttgaaaaactgtgcaaacgactctttttataagaaaagacgttgacggaatggcgaggcaaccgtaatattcgcctcgttcccccgcaagagggaacgttgcggagcggtagttcagttggttagaatacatgcctgtcacgcagggggtcgcgggttcgagccccgtccgttccgccaacattcagggccatgttattaactaacgtggccctttttctttgctaaaatttccactatgccattgccgtctggctcgcattcgcttgtatcctttttatttggattccttcagattttcattttgccgcttggcgtgctgacagcatcgcaggataccctcgtcgcccctctgacgtccgccatcgaacgtaactgcaagggatcgccattcaaaaccgcctgctggcggaagacgaagccagcaacatcgctttccatctagtgaggcatactggccttgatgcgtaaattaacgatggcgaatttgcagggctgcgggcaggtagcgctgtagcggctcaggcgtgttgtcgtcgataagctggctgatcagatcgtagcagtgccaggccaactggcggttgtcctgctgcacggtgtcgatacgcagcgacagcgaatcatacagatagtgatcgtcaaagctcgccagatggatgtcgcaatcgagcaaatgatgttggctcatatagcgcagcaccccttccagcagcccgcaggcggcggtaaacagcgcctttggcggacggccgagacgggcgcagagtgcggcgaacatctcatagccggaactgggatgatagttgccgttgatcacccattccggacgcagttgaatgcctgccagtgccaaaccctgagtaaagcccgccagacggtcgcgtgatggtgagagccgtggctgaccgcctaaaaaccagaactcatcgctatgctgaggtgcgatgcgagaaatcagctctgccgtcggggtaatagaatcggtcatcaccagcggcaggccactttcattcgggcaacggtcaaacagcaccaccggcaactgctcgctaagtttcaggtagtcggcgtcgttatgcatacaggacgcgacgatcagtccatcgacctgacgagcaatcatattattgaccaccatactctcctgaccggggttttcgtcggtacaggagataagcagctggatgcccgcctcgcggcacagcatctcaagctcgtgggaaaagaccgcaaagccgtagttggtgatctccggtactaccagcccgatggtgtggctgcggttatcgcgcagcgagcgggcgtgaatgctcggctgatagtgctgctcgcgggcaattgcctgcacgcgctcgcgcgtttcctgcgccacgcgtagctctttgccacgcccgttaagcaccaggctggcggtcgctttggaaacgccagccagttcggcgatatctttaatggtaacgcgtttggttttcattacgacgccatgagcctgaaagcaaaacgcttattctaccatgcatgtccgcagcggccagtaacagaatgcgccgggcattttgcccgtgaaaaccagctgtgccggatagttcgggaagtagcggctgctcatcaccccttcaccttcgttgatgaaaatttccacgctcgactggtcgatgaaaatacgcagcgagcggatcgtaccgcgccagtagcgatagtgcgtttcgtcgctggcgaggctgcgtcgcgccaggcggatgccgttggcatcgcactccagggttaacgcgccgccgaaatcgatgtttaacgcgtcgtggcaggtagtttccagggtgatttccatcggaaccaacggcagggcggcttcctgccagccgtgcgctttgccacgcagagcggtcagttcacgcagtgggcgctgatagagcctaccgtcgataaactccagctcgcgcaggcaggtcatctgatggatccagccgttggcacgcgtcggctggagcacctcttcgccgtccggcacgcccatccagccgaccagcaggcggcggccgtcgctagtctgcgtagtttgcggggcgtaaaactcgaatccggcgtccagttcgtgcagctcatggtgtttgaaggtgccgctggcgtagtcgaaagcaccggccatccacaccgccgggtaggtattgagatagcgctctttctcttgagcgatcccctgcgggcagcaaatcaggacatgctggtcgccgagtggaaacaggtccggacactcccacatatagcccgcgttacgcaggccattgatgccgcatccggcgatttcacctttggccatccactgatggaggtctgtggagctgaacagtagcaccttgccgcgtttttgcagatcctgtgctcccagcaccatgtaccagcggccttcatgctgccagactttcgggtcgcgcacgtgaccggtatagccttccggcagcggcaacaccgggccgagtttactgaaggtaccatcggcgttttccgtcgccaggcattgccatgcggttcggctaccatcggcaaatttgacgttgccggtataacacagggttagcgtgccatcgttatccaccgcgctgccggagtagcagccgttgcggtcatactcttcgtcaggcatcagcgcgatcggttcatgctgccagtgcagcagatcggctgaactccagtgcgcccaacatttgaacttgtgatcgcaggcgagcggattccactgatagaacaggtgatagcgtccggcaaattcgacaaaaccgttgggatcgttcatgagccctgtcacgggcgcagggtgccaacgggggtagtggctatcggccagcgcgcgcggctggccctgcataactgcctgcaaaattgcaggcaagcgtgatggaagtgacattattcggcgtccgttttgtatttcagtaccagagagaccacaaaagcgacgccaaaggcgatggccatcccgataatgtagttcagcagcgagctggcctgcacgatggccatgccagggattgccgtaaggccaaccgcggtcatgtagacgtgcattgacaccacccaagcgccgcccgccgcgccgccgatcagcgcggcgataaacggcttcacaaagcgtaaattgataccaaaaatcgccgcttcggtgatccccagcatggcagaaaatgccgagggcagggtaatggctttgattttcgcatctttggttttaaaccataccgccagacaggcgccgccctgggcgacgttggccatggcccaaatcggcagcaagaagttgacgccgatggacgggttgcccagcagcccggcttcgatggcgtggaaactgtggtgaataccggtaatcacaatcaccgaatagaggccgccaaacagcagcccggccagccaaccggcatggctaatcagtgtgctgaggacaaacgagatgccgtcgccgagcgcgcgaccggccgggccgataatcaacagggcgataaaaccggaaatgatcaccgtcaggaacggcgtcaggatcagatccagcgcatcgggaatgacgcgacgaagctgtttctcaacgatgctcataaaccacaccgccagcagcaccgggaacaccgtgccctggtagccgatcatggcaatttcaagaccgaagaagttcatggtgtggaaaccggcagctacgccccaggcattggtcagcgccgggtgggtcagaatgccgccgagcgtcgcgccaagataagggttaccgccaaactcgcgggcagcggtaaagccaatcaggatcggcagaataataaacgccgccgagctgcacatatccagtatgatgtagatagcgttgtttgggtcaacccagccgtaggttttgaccattcccagcaggcccatcagcaggccggaggcgacgattgccgggataatcggtacgaagatattcgacagcaggcgggcgatacgctggaaagggttcagcttttttgccgcgatgtcggcggtttccgatttgctggactcactaatacctgctgcttggataaaggcggcgtagactttattcaccaccccggtgccgaaaataatctgcatctgtccagcgttacggaagcagcccttaaccccttcgattttactgatggcctgctggtcggccagtgaatcatctaccagcaccagacgcaggcgcgtggcgcagtgcgcggcactggcgatattttctttacctcccaaaagcggaagcagcgagtgggagatctgtttaaaatccatagtaccctctgaatgcgtatgatttacgtgttttgtgcccgtggcgacgggggcgcagtttctgcgtcattattgtgttcggggcgacaaaatgcgctttgtcgccccggttgtttctgtcgtcaggtttttaaccgtcagaaccaggtttccatctgaataccgaaattccactcaccgccagcggtgaaaccgctactgccgaaggagtcatcgctggcgtagttatccagctttttgctccaatccatccaggtggcgaacaggcgcagctcgggacggttgaagaaatcaccgatgttgcctgctttaaacgtcggggcgaaggtgagtttatagaaactgccgttaacagcgttgcgatctttgtagccttcgggatgcagatccatgtattgatagctgccttcgtaggcgagtgcgaagttctgggtgatctcctggatcagacgcatgttaaaggtgacccattcgtagctatcccctttgacgtaacggtctttgctgctctgtgccagtaccgccggggcgatatgccagcgttcgctaagcggcgtggtgccgtagctggcaaaacgccaggtattggcatcagagaggagcgcaccgtcggagccgatgcctttgacttccgctcccagaccgtgaccatagagcagcgcggttttgctgctgccttcacgcagaccgtagaaactgtcgttatgcaagccaaccagtgcatgcacgccgttattggcagcgtcggtctggatggcattgccgttgtcatctttacggtcgtcgttatctttagctcgcaggccgctcaccattacctgcaccggaccgataaagtggttcatgctcagaatgtagttctgcacattgttatcgacattctccagatcgccgaagttacgcccataaatagagaaattactgcgaacgctatcattccatttcacgtcgtaaataccgccaccggttcccgcgaggaacaccacgtcggaatcgagccagtggatatcaaagttgtcgcggtcgaaacgtttacctgcccacagcgtggagcctttaaacggtccctcaaagctcggtaaactgccgagttcggcaaacgcctggcggatattcaggtcgctggagtctgccgaccagtcgttataggttttttgtccatcggccagcatcgctttgaagcgggtggtcgtgccattatccagcgtctgtttatgctcgagattcagttcgacgtaggtatcggcttcgttgcccaaacggccgatagcgccgccggtttctccggctggcgtcaggtaagggccgcttttgctgctggaggctgcgtcgttcattaacagaccggagcgggcatagccgtggaactcaaagccgcttttctcatcggccttcttctcaagctttgcggtccgctgagcgacttcccgcgtggtgtcctggtttttttgctgctgcgtcgtgagctgctggacttttttctccgccgactcggcgcggttttccgccgtttgcgctctgttttcagcatcctgcaggcgtttttccagcgctatcagacgggcttctatggtactgagatccgtttgcgcgtgggctgagccggtgccggttagcaaagcgataagaaccgcgagtgtgctttttttatacatgctggtcgcatcccaaaagtaaaattgaaaggtgtgtgtttttgctaaaccggttttattgctatgttaaacatgacctgcaagatctgggaatataatttgctaaaccggtttaataagtgtgatagatgcaacaaagtgggccgcgcagggcggcctgaaggatcaaaactggcgattaagatcgcgctggtaggggagggcggtcatcgcacctttggccgttgtggccaatgcaccacaggcttgtgccagagtgagcgtggattccagtgaggcgatgtccgtcggcatcccttgcgtagaaaggctgacgagcaggccagcgacaaaagcgtcccccgcgccggtggtatccacgctggcaacgggtttagtgcggaaatgggtgaactgctgctgaaatgcggcgagtacccccgctttaccttgagtgaccagcaacaattcaggctgataacgttcagttaccttggcgattccctgtgttagatcatcactgccgctgatcaataccagctcctcttccgagagctttaccacgtttgccaggcgcagggcgcgatcgaggcaggcgtgcaacaggtcctgctcttgccagaggtcctggcgaatattggggtcaaagctgacccggcctccggctcgtttgatctgctccatcgccttgaaggtagtgctgcggctgggttcggcgctgagcgcgatggaacacacgtgtaaccattgattggcggcaaattccggtagatcttcctctgtcagaaacaggtctgcactgggacgcaccataaaggtaaacgtccgctcgccctgatcgtcaaggtcgactactacggtggaggtgcggtgctgactgtcgagccgcatattgctgacgtcgacaagctcctgttgcagagtatggcgcataaagcggccaaacggatcgtcgccgacgcgcccgataaagccgctgttgccgccaaggcgggcgacgcctaccgccacgttagccggtgcgccgccagggcattgcagcaggcggccctcactttccggtagcaggtcgacgactgcgtcacctagaacccaaacttttgtattcatgctgatatttctctttagctaaacttaattaaaccggtttagcacattaaagcatagtggcagaatgaggggaacgtcacattcgaaaaattgcgagccagggcaaaaaagagtgggtcggcaaagggctggcattctgcaagcagggggagcgccagcccaggcttataatcaggttcaaagagatgctatccagtggcagattcacaaagcatacggctttgtttttctattgtaccgtcttcatctttcctcccttcgttggttttagctgaaaatgcagcaaagatatttcattttttattgataatgattactatttccatcaatgggtgggccactcatcctgtcagatcgtgcaacctattctttttattttcagtgctgagcatgtcgtgagccatatatcgttctctgaggtgaagctgggcgttcaccgggtggtgaataaaacgccgctgtttcacaacactgaaaaactgaaaagggatggaacatgttggaaactgttcagtcagtccgttggttgccgctgacaccggcacagtttgatttttgggaggagtttagctttcacccgcatcagcccgtctctaccgttgcccaccgcattacgctacgcggcgagcttgatgagctggggctgttagcggcgttggagcaggttgttgctgaaaccgatgtttttaccatccagtttcaactgcctgacaatgacgaactaccgctacagcgctgtaatccccaactgcgtcctcaggtacgtctgcttgagttacaacagaccgatgttgccgagtcgatgatgcaggccgacatcgagcgtcagctcaatttgctgagtcagccgctggcggtcgtttggttgatccgcttttcacctacgcattacaccgtatatatccgggcacatcacattattattgatggtttcggcatggcgctgatcgaacatcgtctcgctgagctttaccgcgcccgcctgcaaaaatccaccgctagccaacctttccacgcgttttatgattttctggctgaagagcagcggtacgccagtagcgaaaagtcgcggcaggacgccgagtattggcggcgatatgttaccaacgcgccttcgctcccggttctgcaaaagggaggggaggactacggtgcggagtgtctgcacagcgaagcggtactacctgagcgttttagccagcagttgagcaccttttccgagcgctgcggtacaggctggccggatttgctactggcactttccgctgcctggttgacgtttcggctttatggggaaaataaggctgaggtacagccaatctgggtgcccgttatgaatcgccgtgggatggtggccgccagcgtcccagcgttggcggtgaatattctgccgctgtttgttcaggtcgagccactggagagggttgtggactacgtcaaacgcaccgcgaaatcgttgcgagacctgcgtgctcacgggcgttatcgtattgagacactggccgccgatcaggggttgggaaaaggaacgcgttactttttctcaccgttgatcaacgtgcttcctttcgatcctccgctgtttgcaggctgtgaagcagagcgggaagtcatggcgagcggcccaggggatggttttaacattacctggcgtggccgtacggatgctagcgaactgcatatcgacatcgatgccgatcctgcgatgtatgcttcgctgaatgtcgaggagatgttcacacacctgcgcagcttcctgagcagggcgatgatgcccgaagcgggacagcagccggtttaccaactgctaaaccaataagatcttccgccagcgggctggttcgctggcggagattggctttttaacgcagcagcgagcaaacctcatcggcatttttgcacttaatcaaggtcgcaactggcagtgaaacgccgagttccacgttgatcctctctctaagcgtgggcatatggctgagtttcagccccatggcaagaaacggggtctgatgatgccattcaggccgcagcggctggcccatcacggcgcaatagattgccagtaccgtttgctgaggtgtcgccggggcggcgagcgttgctgaatgagatagttccagttcggtacgtagcgcatggcgatcgactttgccatttgccgagaggggaaagcgggtttgcacaatgaagcggccagggatgtgagttgcgggcaaatagcgctgtgcgaagatgcgcagctccgacatgctcggcaggaccttatgtgctgatagatagaccgcacccaacgacttttctggtgtatcgtccaccgcgtaatcgagcaccacaatatcctcgatggctggatgctggcgcaacgcttcttcgatttccggcagtgaaatccgtacgccgcgaattttaacgtagccattaatacggttggcaaacatgatgacgccgtcaggccggtaatagccaatgtctccggtacggaacgttcgctcgctaataccatctggagtcatcacgtcaacaaagtcgtgctgcactaacgctccattctccagatagccacaggccagattggccccggctgtgtggatgcgcccagccacgccgcaagggcaatgttcaccgctgtcatgacagataaaatactgagtacccgccagcggcttgccatagggaatttgttccgtgtcgctagcggtgatctcgtgccagatgctccagatagtcgtttccgtcgggccgccgagtgacatcagccgcagatgaggatgccttgaacgcaatagccggatggtggcgggtttaatgtaatcgccgccctgggctactagccgcagggaggagagctgctctggcgttgcgcagtccagcagcatttccaggatcgctggcacagagcaccacagcgtgatccggtgttgtgccaccaggcggccccaactgatggcgtctttttcctcatgcctggctggcagcaccagcgttgcgcccacgctgagtgaggcaaacacgtcaaacaccgacatatcgtggtgcagcggcgttaccgagataaagacatctcgctcggtgatctgccagtgggcgagggtttgcccaagcacgttggccgttgcccggttattcagcacgacgcatttcggcttgcccgtggtgccagaggtatagagataataggcgggctggctgctgtcgctttgagcgccaaaccgaggtgggctgacgttggcggatttgagctcatcaggcgtgactgagcctgggattgcggcgtcttcatcgcatatcaccagctcgggttggcaattttccagtaaaaatgccgtccgttctgtaggcgaactaatatctatcggcacccggataatccctaacagggagcaggctagcgagataccgatatgctccaggccgcgtggaagataaattgccaccacgctccccgcccccaactgacgcgcgagcagtccgttggccatgctggcgacgagctcacccagcgcctgccagcgcaattgttgtttgccacagatcacggctaccccatcacgagtgccggaaaacagattttctgcgatgcggcccagaaaatcgtcgcttacggctgtgctggcgggagtgttagcccggtaatgcgggtaattcatcgtttcgtggacggggatattcagcgaaccctgagagactatatgcaacatacgctggtggattgcattcagcatagcgctcacctgttcgggcgcgagagcctgctcaacatagtcggcaattatcagtaaattgcgctgctcatcgtacattaggcgaatatccagtgcgacctgcggcgtttgggtcagaccgctttcggtacggattgacgtgttggccggaagcgtttcccagctcaggcagttggtcaggatcaccggcagcgcgggagcatgtccggttcgcggtgacaattggcgagccagatccacacctgaccaggcaaggttttgcaatccgccaagaatgtcttcttgcaaacgttgggcattgtcgactaacggcttgttatgacggacgtagtgaatggcaataaacgtcgatcgattggtggcttgccactctttggccgggaaggcaacggggatgccgaccgtgagcgcttcatcttccgaccagagcgccaacgtatcgagtacgatagccgacagagtagtgttggcaaatagcccccgggatgcgccaaggcgagtgagcagcttcaggtggctggcatccagaatttgttgttcacgccgccagcagggttgcacgatctcgcccaaaggttgctgccagggaagccgggaaggagtaacgacctgcgccagcttgtcttgccaccaggcttttgcccgctcccgctcttcttcatctgcttcgctcggtgcagtgtcatgctcaagtgccgcaagcggttgttcatcaaatagccgggcgatgatatgcgagatcccttggccgtcgaggatcagcgcatcaaagctggtgaaaatctggtgctccgttgcgccaggcaaggtaatcagaatgatccgccaagggggcgacgacggatcgtggcggctctgttggtaatgctgtcgtagctgttgcacttttttagctgcgtcttctgcactggcatcgcgtagatcgatttcttccagatgaggttccagctcaggcagaatgtgctgctgctgtgtttcctcctcgatccaggtgcgtaacgcggcgaagtgattaaccaactctgccagccgacggcggaagtgcgcaggatcgatgagccccctaaaggtcctgaaatcgtgcatggcaacgccaccgagcggccattgctcgctgcttcccagcagataagcctgctggagcgccgttaatggtttccccattcgcttctccttttgccgtactgccgctggaggtgccaaccagcgggaaacgctgtcatcaatatgctgcggtgtcgcggccaggcgttcggcgagcctgtgaaaacgcgtaaagagttgatgcagttggccggggggaaacgcatcctcacgcacatcccagttgatcagaatttcatcgccaatccaggctacctgcgcgtccaacgcgacttgtggcccctgagagatgacccacgccagttcacccaattgcctgtcgacccgctcagagaacagcacgccaccggagataccgaacccggcggtaaagacgatgggggagtattgcagttggccctgctggcgcgaaaggtcgcgcatcacgctcacccctgaatagccgccgtgacccaggatttcgtgcaactgcgtcatggtgcgctggcaataatgcagcagcgtttcatcgggtcgcagctcggcgctgaacaacagcagatcggaaaaatcaccgacgatgtcgtcaccgcccgcaatcttgggagcgcggaaaaaggtcggtacgttgatgcgcaacgcgggttgcctgaaaccttccattatcgtcaggctgaacaaagcaaggaaaagcgagcttaacgtcagatggtggtgacgcgcgcagcgctgcaaggcatggctgatttggggattaagctggattgccattctgcgggtttgacactgcctgtccgtatagggaatggcgggagcagggggaatatccgctaaacgctgccgccaccaggcgcggtctcgttctctggcgctaagcagcagcggatcgtgagaacgctgtgccagatagcgaaaccaggcgacctccatcactggggcgcactgtggcggtggttgttggtagaagcgggcgagatcttccaccacgatccgaaaagagagggcatccgcggcgatcatatccagatcgatatgcagccggctggcctgccctggcaatatcgtcaggctgatttcgcacgggtagccttgatcacgcagcaactgctggttctccattcgccgccgcttgtcagccagcaatcgttgtacttcggctggtgggtaatgacaaaaatcatcgatgcccagtggtggatgactggcaaccacatgctgtagcccttctgcggtgacatgaagacgcagcattgggtgcgtgcggtagagtgcatccacagcgtgccgaaagcgggggatattagtgatagtgccatcgaattctgcgtacaaatgtgcggcaacgccgcctaatgcctgctcagagtgcctgcctacccatgaggccgcctgcattggagtcaatgatttcattgcatatcgttcctgattggccaacggaagccgcctaaatatataacagagcttaatgcgaatgaaaattattcttttttatgttgttggcgatacattgagcagggtaaggttatacgaggcacataaattcactccgtggtcactgagatggcaccccggggctatgcacagggagcaagcagaagatgaggttgttaccgggtaaacgtcgtcatcccatgttaggggttttattattactggccttgctgatgggcagcggccagggctttgcacaaggttggcccagggcgtttcacaacgcggatggctccttcactcagatcccgtcccctccgggccgtattctttcgacttccgtcagtgtcaccggaacgttactggcgattgatgcgccggttgtcgccagcgcgacggccgtgaacggccagttctttgggcaatgggtcaaggtggccgagcagcgcaacattgctaaagcctggcctgcgggcagtgttgatctcgaactggcctatgccaccgcccccgatttgatcgtcgtctcaatcaatggcgcagactcatcgcgcgctcatttggctgaactgagggccattgcaccggtcattatcgtgaattatggcaaccagacctggcaagctctggcccgtgagctgggagccgcgctagggcttgaggcgcaggttgaacggcggatcggcggttttgactcgctgcttaccaacgcccgccagcaaatccatctgcctgatggacaagccaatattatcaattttaacggcccgggaacggtcaatcccgtggcaacaccggccagcgtgcatgcccgtttactcgagtcgttagggttttcgatcgaagcgccaaacccggcctggcaaagcaatcttacccgctccggcgactttatctgggctgaatatgagaatctgacgcagttaacggcgggcaccacgtttctgttgagcgcaggcgacgtcaggattaacgagtttctgcatgaccctctgcttcagcggttgccttcggtacaacaacaccgggtttacagcctcggtgcacatgcattccgggtggattactacagcgccagtgagatggtggcagacattgtccgccattttgccggtagcccaacgcaggagcggtgaaatgtgtgcttggcgacaggctggcctggtctctgggctggttttactgctggttctcagttgctttagcctctatttcggtgctcgccccattccgcctgcggtgatttggcaggcgatcacgcagtttgatccgcacaatagtgagcatttactggtctgctatctacggctgccgcgcaccttattggcaatggtggttggggcggcacttggcgcggctggcgtcatcatgcagacgctcacccgtaatccactggcggatcccggcctgctcggggtgaatgccggtgccacgttggcgatcgtcttgtcaattgcgctgtttgatgtgacgaatgtctttagcagtatgtggtttggcgtggccggtgcggcgatagtcagcgttgcggtgttgctggtgggcggcattgatggcaataacccggtaaggattgtgctggccggagccgcgttgactattgtgctgcttagcctgactcagctcgtcattatcaacagtgaaccagaggcgttcgatcgcttccggcactgggtgattggatcgttacagggaagagggttcgacgtactgctcccggttgccatgctggtgggcgtggggctgttgctggcgctggccagcagcaaaatgctggatattgcggcactcggctcggatgccggccaggcactcggcgttaatccgcgctggctggtggtcatgtccgcgctgattatcgtgatactggccggagcggccacggcggcggctgggccaatcgtttttgttggcctgaccgcgccgcattttgcccgtgccattgccggattgcagcatcgaacgctattgccttgggccatgctgctttccgccatgctggtgttgttggctgatattctggggcgcatcgttggctatcccggtgaagtcagcgttggcgtcatggtggcactaaccggtggtccttgttttgtgttgctggtgaagcgttggcagggggaacgggtatgagcgtcaacaggacggtgctggtatgcctggctttggcctctctgctgttggttgctgccgctttcgctctgacggtggggcgctttacgttgccggtatcgagcgtgctgcaagccatcacgggggaaggaaatcccatggcgcagcaaattgtcagggcgatccgtctgccgcgcgtgttgacggcggttttcgttgggggtgccttgggcatctccggggcgatttttcagtccgtatcgcgcaatgcgctcggatcgccagacgtcattggctttaccaccggtgcggcaaccggtgcgattgtgcagattgtcctgcttaacggtaacaccgtggcgattgtgctttcggccatggccggggggctggcgacgtcgctgctggtctactggctagcccatcatcacggtgtggtaaagggataccgtctgatattgatgggcattggtgttggtgcggtactcagtgcactcaatggtttgctgctggttaaaggcgatattgataacgccgtgatggccactttgtggctggcgggaaccacacaggggagaaactggctgcacgttatccctgtggccaccagcatcgcgttgttattgccggtggtgctgatgtgtgccagggcgttgaacatcatgacaatgggggatgaggtagcccaccagttgggtgtccgtgttgatctcatccgcaagattatgacgttttgcggcgtgattctggctgcggtggcaaccagcgcggcagggccgattgcctttatcgcgcttatggccccacagctggcaatccgcctgacacgcagtccgaacctgccggtgatcagtgcgggtctggtgggcggctgcctgttgttaggggccgacattgtcgcccagatacagccatcagggctgatgatgccggtaggattaatgacggggatgataggtggcgggtacttgctggctctgctactgcgtggcggctgtcgctaaggctaagggatgagtgtcgcaaatatgatcaaattgatttgcattcaatattgtaaatgattatcgtttacgtgcgttggcttacttgtttcttggccgacgtacctcgggaaatcctggtggatgacgaataataaggtcgtaaagaccagccaattaagcagtgtgttctttgtcgctcagttgaaaaataaaaatttagtgtgcatttggcaaaggagatatcaatgagcgaactaaagggtgataaaaaatgcccggtttcattatgtaacaggccccaacgtatttataaaaaatatcatatgccctccgtcatgctggggttatgtgttttcgccgcagcggatgcgattgctgccgatgatgctccaatacgcaatgagaataacgagcctgataccattattgttaccggggaaaaagtaagacgtactatttacgataccggatccagtattgaggtgtttgacgatgcgcggatagattcactgcccggtgcaacgcaggtatccgatttattaaaaatgacggccaacgtcctggatacgggcattggtaacgatattccaaccattcgcggtattgatggttcagggccagccaatggcgccaatgccttcctcagcggtacgcggccacgtatgaacctctcgctcgatgggcgttccttaacctataacgaattagccgtcgggccgcaatccctgtgggatatgcaacgggtcgaagtctaccgagggccgcaaaactacattcagggtcgtaatgcgattgccggtgcggtggttatgagcagcaaggatccgacgtttgactggacttcggcagtcagggccgggggcggaaatcaggattctactcaggcttctgccatgctatcggggccgattgttgaggatcaattggcgtttcgcctgagcgccgatcgtcagcggcgggggaggtttgtcgatctgatctcctacgaacctgtgggtaatccacgcgaaatcgaagtgaccaacatccgtgggaagctgctgtataaccccgccgggctacgtgatctcaccactaaactttcgataaatcactatgaaagccaggcaccgcagaatgaagcgctaagcccggctaaccatgccagctcccgttttgaccggcgtcgcccagtcgttgagacccaatctaccagtggcatttgggatattgcctgggagccgtcggagcagttaagcgtccagaacaagtttgtttataccgattttagtaaccaccgccgtaccgcagaagcgctgccgtgggccgacatcgaaggcaaagagttccaaatggagccgctggtacttttcggtacaccaaacgatcgttggcgtggcctggttggtgcgcgttacttccatgcgtcgcaggatgagtttgttaacctgttccctggcggtagcccgttcaaggataaaacagatacctacgccgcctttggcgaattgacctgggccgtgttgccacatatcgatattaccgccgccagccgagtggagagagagcaccgtcaacgtaagggcggcaaggcgcgtaaggtcgattttgatcaaacctgggatgtgttcctgcccaagctggatgttgcgtggaagccttcatcgcggcaaacctttggtgccaaggtggctcgcggctataacggcggtggcgctgggatgacgttttcagcccccctgatcaactatacctacgatcctgaatatgtctggaactatgagttgtatagccgccatggcattgaagatcttaatctcgaggtgatcaccaacctgttttataacgactataaagacatgcaactgccgtattatctggactccactatgaactctatgatgatccgcaatgcagataaagtcgaaacctatggtgctgaacttggggctatctggaaaccgacggggaattttgagttgaatagctcagtagggttattaaaaacaaaaatcaagaaattctctgacagcagaatcgatgggcatgaattaccgcgcgctccggcagtcaccgccaatatgggggcgaaatataatcttatgccggggttggagttaagcggtaatgtaacgctttccgatacctattattcccagtacgacaacgatccacgcgggaaaatcccttccagagtgattgccaatatgcagctggcttataccttcaagcaggggcgcgtcagcgtgtttgcgcaaaacctgtttgattctgataaacgcgtcatggtgatgaataacgacgtttctaccgcggttattcagcggccacgcctggttggcgccgttgtccaactggatttctaaggccatctatcgtcaatgaaaggcgcagcaggtttttgcctgggagggaaatgtgaacacgagttttagcgaattcagcggtgaagaagaagctgctagcgagtttgagcagcaggcctggttcgaacaccagcaacagctacatggggaaggccaacaggtgttggcctggcagttaaccggtgccgtggattatggccgcttggtcaacgtactggaacaaacccagcggcaattgccaggtatcaacgcccgttacgtttatggtgagcgcgggctgatgcgcagtgacaatacgtgttcaccgccagcgttgaccatccagacgatccgccatccccaggaagctattgacaccctgttaagcgccaaagcgataccttttgacctggaacaggctccaccactgcgctttatgctgttttccggcgacagggggggcattctggggatggtggtgcatcgcattctgtcggcatcgctggattggcgagatataccgcaaaaggtcagtgcactgtatcagcaacaagttctctcgcactcctctgagccattcattatggagctcttgcccctgccagattgtgccgctcggcagacctcggtggccgtatttccgggggcactggcttcctctgtcacgccgggatctgatgcggcaatacggcaacatatcctgcaagccttccgcgaggcgctcgccgtgcccacgatgggagaagatgatgatttcttcgattgcggcgggcactcgctgattgccacccgcattattggccgtttgaagagccagcagcatattgagatcaatatcaacgatctcttcagctatcccagcgcggctcaactggcgcgctatgcctacatagttaataacgtgcccgcttcgccgggtaagcaagcggagagtttggcattgctaagtccgcaggctcctttatcgctggcgcaacggtcattgtggaaaatctatcaggcgctaggctgcggtgaggccttcaatattccctttgcgctgcgctttctcgacccgattgatgaagggcttttcttccaggccttccaggatattttgctgcgtcatccagctctgcgcaccctgtttgtcgacatttccggcgaggtttatcagcagatcgttccgccggagatgctgtctcaatacgaatggttctggcattcacagtctcaggatgtgccgctggatcaggcgctacaacgcgcagccagccaccactttgagctcgatgatgagttaccggtacgcatcaccttcctgcaggatgaggaaaatggccaacaggtggtgtcgctattgttccaccatattgtattggacgagtggtcggtgaatatcctgatggatgaattggctttggcgatggcaagccgtttcgccggatcggcaccggagtggcagcagacacccgcgccgttccacgcgttcgcaatccaacagcaacaggccggggtcaacgatcgacatctgcggttctggctggaacgtttgcaccatgcaccgtcttcggcatcgatttttgccagcgaagcgcaacaggccgatgcggcttctcactccggcaactgggttgagttcaaactggaacacgccgtcaccactgggctttaccgcctggcgaagcagcagggtgcctcactgtttaacgtggtatacagcggaattgctgcggcactccatctgcttggtggcgcgaaagatctggtcattggcacttcggcctctgggcgtaacgacgcgcaatttttcgataccatcggttacttcaccaccgttgtcgctcatcggatcggttttgccgatggcaccacgctgaacgggctgatcgatgacgtgaaacggcagataaatgattcgctgccttttagcgacatcccgatcgatctggtcgaagagaggctgtttggtgattgcacaccgcgcgacagccatatgtttgaggtcttcattcagctccatgccaaaaataagcttaacggggtatttagcttggccgacggccagcagatccactttcgccagatcgatcccgagaaaacggaatcggtgctggggttgcagtttgaggtgatggaagagcaaatcgacggcgagccttcggttcgcgtcatgttgagctatcgcaccgatcgctattcatgcgagcaggtgcagcagatcgtccaaacgacacgtcaggtgtttgccgttatggccgattccgttggtcaaccggcgctacggcttgatgcattacgccataacaggagtgtgttatgaagcaggagccgttgaccgatattcagcgcatctacccggctcaaaccctggtagagctggtttatagcgcctcgcagcaggcgctgtttgtcagctctcccgattgggaggatgagcggcaatcccgtgtactgcggataaatccgcgaaccctggccgttgaggaagagatcccgttgcaagtcaaagggtttggcgtagcgctggacgatcgccgtgggcatctttacctctcccaggggtttaacggcaccgtcgccgtggtggatatcgccgccaatcggccgatcgccaccattgcgctgatgcaggagattgctttcaagcaactgtatcaacgagaagggattgtcggcgagcggcaggcttttttattacgggaattggagcgctttggcgtgagtgaaggttttccatggaagctgcgggagctggttttcgatccacgtagtgagcgcctgttcttgccagggctggggttgggtatcgatagcgtgctgttggtggtggatacccgcaagcgtcaactggagacgattattcacggtttcggctataacgtagtggggatcacgctggatgaaacggggcgccgtgtctttgtatctaacatgcagggccagctgtttgtggttgatccagatagcttgacgatcgtttcccgatgggagatcgaagccgatcaactgcttaatatggtctatgacccacagcaaaaccggatcttcggtgtcgatcagggcattgatcgtagcgattggcgtaacaatcatctggaacgtgaatatgttgcccgtagcgcgggtcatcaggtcttcgctctgaacgccgataatggcgacgttatcgcacgtatggcaacggatgaagtgccgatcggcctggcatgggatggcgagcggcaaaggctgtacgtcgccaatcgcaaaggcattcgcgtggatattggcgagggcacgctaacggtatttgatactgcccgctattgcctgctacagaccatacctatggctccgcatcccaatagcctggcatttgatgaggataagcagtgcctgtttatcaccgtcaaaaatgatgaaaccatgattaaggctgggctgccggaatgcgttgcccgtatgcaattaggtgaagggacaagggaggcaaagtaaattgccaaggctcaagctgcacggattcaataatctgaccaagagtctgagtttttgtatctatgatatttgttacgccgagacggcagaggagcgcgacggctatatcgcctacatcgacgagcaatataatgctaaccgtctgaccgagatcctggttgaaacctgttcgctgattggggccaacgtgttgagcgttgcccgccaggactatgagcctcagggggctagcgtgactattctcgccagtgaggagtcggtaaacccaaatggcgtcaaacctctccagccagagtccgttgtggcgcatttggacaaaagccatatctgtgttcatacctacccggaaagtcaccctgggtgtggggtttgcacctttcgtgccgatatcgacgtctcgacctgcggggtgatttcgccgctgaaagccctcaaccacctggtccagcagttggagtcagatattgtgacgattgattatctggtcagaggttttacccgggatgtgcatggggtgaagcattacatcgatcatgagatcacgtcgatccaaaacttcatttcgccagagatacagtcgttataccagatggtggatgtgaacgtttatcaggaaaatattttccataccaagatgttgctgaaagcattcgatttgcataattacctgttcagcaccaggttgcataccctcagtgaggccaggcaacaggagatcggcaagctgttatgtaaagagatgcaggagatttactctggacgaaatatgccatagacggggtggggtgggggtgatgcctgctaccggacaatcgcaggcatcaatttgcttggtgcactgaagaaatcagtcatagctgatattaaacaataccgcactcttcacttttccgggggttgcgcgcccggttgcataatactcatagccgatatcacactggctccggtgatcggcaatcacggcacagccaacgcgtgggccagtgcgtaaatccagcggcttgtcattcatcagaagcctgatttcgacgttttcggcctcgccgttcagcgtattgaccaggttgccggtatcccgactgaccgtcggcccatttcccagcgtaatatagggcgtgtaaccattggtacaatgtaccccaccgatatggatactgcctagcgaacggccatgagtcataccggctgcgcgtaggctccccgcagagacctgcggcatcatccagtcgtagtccttatgttgttgcccctcgacgctgtcaaaataacaggtcgcgagcttaatggatccagtgacgttcagtatgccagtagaggcgccttcaacgctggtgccgcagcaaatcagcaccagcagagacagtattctctgcgtattcgttatcttcattcaccgctcccgatcattgataggtgatcataaactctatttgggcatcagccctgcccgcccggataggggttgaggtttgtatataagtcgccttgacgcccaggctgtaatcgctgccgcggtcttcaaggaaggtgatgtaatttgccagattgatgttctggttgaatttggcccattggtagttgccgttttcctgcctgaagctcagttggacacctatccctgaggctgcgtcaccggcggtggtattcagtttcgagatcccgcgttcagcatcaataaatccgttgcgcggcgtcagcttgaggctgataacgttgggcttgaaaacgccgtaagaggttgaaccatagaaggcagggcaacccgacagcacaatctgggtctcggcgctgcctgccgtgctgccgataccgttgaactcatcaggatagtgctccccgagcggcaggtaataattgttaccaacgttgcaggtcgccgggatcgccgtcaggttgcccactatcctcgcttgttgatagacaaaactttcaccattgccatcgaatgaggttttgaacctggggagatcgctgctgctaatcgttccgctgccgatattggcggctattttaatcattgcaatattaaaactgactgcggcatcgtcctgaccggtaaagttgaaaacgctgtcgcggctgggtgaaaagaaggcagtaagcctacctgggagctgaagatgggagccgctgttaccgtctggggtaccttgccacagggctaccccgacgccagaaatattggtattgaacacggtgggaaacgttgcgtcacggtagctggattggccatggggagcactgatgacggtgttaaccaggtcataaacccccgcgcggcacagcagactggcgccgttgccattggtctggatacgttgggaatagatcacactgccgatgggaagatcctctcccacggtaacatagccgccgatggtcaatcgggtatcaagcggagctttgactgcggaggaactatcccaatcacaacccgcacttgctgcgagcgcattctgtgcatacaggccgccgcagagcatcagtgatatcgctgttgctgaggcgaatattcttttcatgttgtttctcatttcgtgtgggcacttcgtcattggcagacgccttgaatcaactgcctgccctcttcagcggtgcctggctgtagcgaataatggatactgcaatgctctgcctgactatccccccatctcacttgcaacacgcctttcaggtcgagatcgcgtgccaccaccaggctggcttggccgacaacccctacggcgttgtttcgcgcatcatagacgttggcagcgaagggcagtgggctaccgtccggtcgcttggctctgatgtaggtcaccttgccgcgtttggtttcataatcaagcaggaccaatgcaccagcgcggggagcggtggtattgcgggtagacagcaactccacgtcctgtgaactgcccttggggtcgatatcgatctgattgagatagtagggccgcaggtaagggacgatggcatagccaaaacggtcgatctgaacgccgggagcgctggtgacgagagcgccttcagcaccaggtgcccttaccagaccacccgtttcgccaagtgattgccctaaagtgataccaccacggtgggccaccagagcaccatccatgcttgctgaaacctgccggtttccctgcccatagctatagtttgcgcccatacgggcaagggatgagcggtagccaacgccaccgttgaaaaagttgctattgccttcagtattacggctggtgctgatgacataattaaactgattctgttcacccgcattgcccgacaggccaatcaggccagtgctccccttgtcgtcggtagtaccggtagcattgagcgttggtgcatggaggctcgagcctagcggtaacgagagcgtcaacgcatattgggtttcccgccgatttgccgttgtctcttctgtatttcctgtgagttgaccgctcagcgttcggttgaccgaaagggtatagctaagattgcgccagaagttgctatagcctaactgcaggccctgttgcgaactgctctggttccaataagtggtatgattgccgacggcatacaggtttccccaaccttctcccagcggctggttgaccgaaagcgtaaacaggctacgttgacgcccataggcatcgatatttccattacgcagggccagatcgcgcagttggacggcgtcatttaagctcaggaaaccgtcggttgagtaacgataagcggccacggagaagctggtttgtgtttctggatacatctggctgaagccgattcgatagctttgccctgaacgcggatgctggtcgggcaaacgagttttcgcctgggtgacatccaatgagagggcgccgatgaacgtattcatggcaccacccaataaggccgaaaggtaccctttgctggcggtggcaccggtgtagccggtaatgaaattactcaggcccaactggtaggtcaggctgccaaattcaggcttgtgtgccaacccatcattattcactttacccgcagccacttcgtagcggcttatccctggccgcaacatttgagtcactgaagcatatggaacagtgaaggatctgacttggccattagcttcttctacttgtacggtcaactcccctccatagctggtggggtagagatcgttgatctcgaaaggtcccggggataccgtagtggtatagagtgtgtaaccattctgagtaatgatcactctggcattggtattggctatgccccgtactacgggggcgtagccacgtagggcgtcaggtagcatgcgatcatcagaataaagtctggcccctcggaaacgtacgccgtcaaacagttcgccactggtaaaggcgtcacccaggatcaattgagattgcagcgcggtgacatcgcggctgatataggacgatgtgcttttgtaatccccgccactctctcccgaggaccaattgaggctgccgttatttcgcacgcgccaagggccgaagttcaggccgttacgcagcccgagatagccgtaggtgttgctgttttcccgctgtcttgactgataaacgttggcgttgtagttcactatcaaggcggttaagccatcctcccacagctcgggattgacatagccacgcgttgtcctgttgagcagcaactgcggtatcgtcagcgtcaacttttgctcgccgacatcaaagctgacggtggccctgggcaggagttcactgagtgaaccgcaatagcccgcttgcactaatggcgccaattgcacggcagggatctgagccaacagtttctctgcgctcaaattgagcaacgagaagaaactgcccggatagcagggaagggtttgcaggttattgcccggctgggccttaaactggattttttcattgccgatccgctggccgttaagttcgatcgccacggtgtagatacctggaacaacgacgttactgcggctgaattgggccggatcgaatgttccgaccttaccgccagggaaaaaactgggatcgaatgtcacttcttcgggcgagtctgccgcatagctggaagtggccgaaaccatggcacatgaaagaaaccacgtcagcgcggtttttattgtcggtttacacctagtcatagcatccttgatgactcagataagccaatacttctgaaaaagggttatgtcagcggcctaacgggtatattttttcaataaaagccccatagtcattaatcgccttggtgattacgctatttggcggcaccgcaataaccttgttatcgcgttttagttgaaaggtttgctcagagaagggggcgatcatgccgccatcagtgccagctaccgaggcggtgccgtagccagatacctgcacggaggcatagctgatatggtatggcgtggggtttttagcgagcagtttttccccttgccgttgccaactcaccttatccatggtttccagtgacagccctggcaacgttgaggggcggtaaaatacctttaggcgattgcgataggcgatggagaggtaattctgatctcctttcgactggggagggacttcaagcacgttgatccaatatagcgtctcgcggtcggtggcgtggcttaccaacggtgttgcggtaatacgtaaggtttgcgccttggcgggttcaactcgtgaaaccggtggcatgattataaaggggacattgctgtcctcaggcgctgaattcgcatcgcctgcatcaatccaggattgcaccaatagtggaaaacggcttttattttccagtttcagcgagacttctttggcatcacttgggtagatcacgcgcgtaccagatatgacaataccggcatacaaagaggaggaaaaaaatccgcttaacagcagcgatagcagtggccaatattttttaatcaagcgcataacaatctcgtcagtatagacgtggcaaatatggccctgtggtaacagggccataatctattcagtcaggttttattgataaacgatgctgtatttaaccgttgaggcaacttggcccggccccgccgcgccacctacagcaacatactggccaaagtaggtatattcggcagtttgattgacgatggttttcggcgcatggttgttattgccggataccaggttgatcgggctgttggtttcgccattcaggatttgtacctgaacatttaacgcaggattggttgctgaagtatttttcaaccaaccggtcgcattatcgatagccgggctagttggttcaaaatacactgaagcaatcttaccgttggtgcagtttaaatcagaagggccacccagtctgatggtaaatggcgcaggctttgccgtggcaccggcaaagcttaactcactggcactgaccgtctctaaaggcacgttcagatcaacagcaccatttggcgtctggtcgttgatcaggcaagttgcgtcagtgacttcgccggtgaaattaatgttaccacccgctacggtgatggcagcggaagccggaagcgcagcaaagccgccgatagccagtgagagagccatgactaatgtggtttttttcattgcatatgatccttgttaattatccttaaaatactctgagtgtgacatggagtgacatcagagccgtcatttcactatggcagtgaaaatgctgttccctttttttggcgataagcaatcaaatcatattttttttatatacagcggcgttacagaggctccacgtaaggtatatccttttcctcgcgagcttttaataaaatcatcagcgataccaattttacttagccttgcttttagctcggaaattacttgggtcaatctggtggttgaggaggagaggttatgattctcccaaacctgtaccagtaattcctggttggaaacatagccacagcttgcgtgtgccaatagatacgtcagcaaccgcagcatcgtttcacgcagctttagatagttggtaaatcgttcctcaccctgatagtgatactctatcgtattatagagtttgattaccgaacccgatttgatatctacctgatactcatcattgataatatagccaaaaagcaataacccactctcgcccgccttggtgatgggggctgctacatatttaaattgactcgtatcatccattatcaactccgccgcatccgctgctaaaactgtctggctccgacctcataaattggaactgtcatttccacacattggctttatatattattgcctgaagagttaatgtcaattcataaaaataaaaaaataaccagaataaaaagaatttaagtcttattgctgcctgatttttggtgtttttgtttgtttttatcggatgattggctggtttttgatgtttaatatcattactgtaggaaatttaatgcataagcataatgtgctgttttgggggctttatcgcctatggtttttgttttttcttttaaaaaaacgcgtgagtgaagttaaggttgaaataatcagttatctgacagatttgtattcagaggaatcctaatgactttttatcttatattttattttcgccattcgcaagtgggatgaatcgcaataataacaggtatgtatagatgttaaacatatctatgcttttttatttatgattttagtcttggtggggcacgcattccttgtgcggatgataagcaggccgaatagattaattcggcctggtgatatcagagatgtctcagaacaggactgagtagttcaaactaaaggtgcggccacggcctttatagctgtacaactccggcgcgccgtaggttgggctatacaggattggcgcacgttggccccacacggtggtgtagtctttgtccaacaggttctctacgctgaagctgaccttgcctaccggcagggcatagctgctgaggacgtcaatggtgttatagccgtcgagcttgcggccctggctgtcggaaacgtcgaaggtttgctgcgactgcacgcgcaccgtccagtcacccggtgcccagttgacgtaggcggtggctttcgacgggctggcggtgtcgacggtcaacttctcccatttaccatcggtcttggtttccgacttgatcaggttgaaggtggcaccggtgctccattcgctgtcatcaaagaagtaatccaccgcgccttccataccataaatccgacgtttgtcagcgttcatgttgatggtcatatcggttttgttgatggtgatggtcttgtctgacagggaatagtaggccgcaacctgggtacgcagattgtcgccattgtagcgccagcccagctcgtaggagtcgaccttgatgccgtccagcttggagtcattgacgttgacgcttttttgcagctgatagtggccgttcaccagcttataggtgccggagccgtagtacttggccagatccgggatctcaaacccttgtgagaagttgaaccaggtctgctggcgttctgtcagatgggccagcaaaccggcgttgaacaacgcgttgttgtagtcggttttaccaccgggcacggcatcggcagaggtcgccaggccgttggcgatcccttgttgctgtgcgtagccaacgaaatcatccaccttgttttcggtgtactggtagcgcacgccgccgctcagggtaaacatcggatcgatgtcgtagctggcctgcatgaacggtgccaggttagtggtggtatagctcgggtagcggccgacgttgtaggcattttgcagcgtcatcccgccagactgctgggccttcgccagattgaagaactgctggttggcattgaagctttcatggtcggcatcgaagccgtaggtcaacgtaaggctgtcgatcggcttgctgttcagggtcagcttgccgccgtagaaatcggttttctgttgcgaagcgccgatgctggttaccttgccgccgctcagggtagggaacggatagaaggtcagcgactcatcacgataatacacctgcgccaccagatcctggccccagaaatcggtgttggagtattgcaggttgatcagatggcgctcggtgcctggaatacgatccgaatccagattaccgctgttgtaggcctgcccgctgccggtcaccgccgagaagttttgccccagatacaggccgtgcttaccgtctgactcgctgttgaaatattgcgtggtcagttgcaactgctggtgatcgtcgatattgatggtgccggtgcccatcaggtcgatacgatcggagtattgcaggccggtttgggtgttgtcgatcagcacctcgtcgcctttgccgtcataccagccgccgtaacgctgataggaaaccgacaggcggccggaagccttatcggtgccaccgctgaccgctgccgacacgttttcatcgtgatcgctgctgctgttaaagccggttttaccgccaagctggagctcaacctgtttttcttcctggcccttcttggtcacgatgttaaccaggccaccggtgctgccgccgccgtacagcgaggtagccccggaaatcacttcaatatgggcaatgttgaacggatcgattgaatcgagctggcggctgtcactgcgcgatgagttcaggcgcacaccgtcgatcatcaccatcatcgaacggccgcgcaggttcatgccgtagttggtacggccctgactgctgacgtccatgcccgggatcagctgcgacagcacatccttgatctctttaccgccctgcacctgttgctcaatttcctggccttcgatcacccaggtggtctgggccatttccgctacgctgcggtgagaacggctggcggaaaccaccagttgggcatcatttttttgttcttctgcccaggccgttggtgcgagcattgccaacaggcaagggtttagtacccagaggtgtctgcgtttcattgttgttcaaacgtttccatggttagttaaagttaaagatggcgtcgtgtgcagtttgggcggtgaccgctgcctgctggctacgccattggatcacagccggggtggacgttaagtcgaaccaatcgcgtcctaatgcccggttgagaatacgggccgaacgccaggccatcaggctgagctggggttcggcaatgccatgactgtgcatgccggcattaacggcaaacagacagttttcgctcggcccctgccattccagggtgaaatccggcgtgatgcgatactcatcgttcgccgtggtcagcaggcgattggccagcggtgtgagaaacgccgggcggtcttgctgatagccggtggcgaagatcaccacgtcgcagtcgaaggtttccttgccctgatcgagatggtgatgggtgaccagctgatagccattgccggatgcgtgcatcgcggccaatgaacggctaggcagcaggtgggcccaaggcttttctcgtaatacttcaaagcggtgatacatcgcccggtaaatcgccagcagcgatccgctagtgatgccgtccgacgtcattttctgctcggtcagcatgcgctgcttggcgctgtcgctcagggtgtagaagctttctacatattccggcgtgaagtactcattagcgaaggcggcttcgtccagcgcgttgtaattgttgcggcgtgagatccagttcaactgcttgggctggccccattcggcgcggaaaatattcaaaaacagatcggcaccgctttggccgccgccgatcacggtgacgcgtttgccgctaagatccgggttacgcaggctcatttcgctggcatggaagcagcgatcgttttgctcgctgacgcagtctggcagtttggggcgtttaccgatgcctaggcagatatggcgggcacggtagatatcgcgctgggtggtgacaacaaattggcgttgctggtcgtcaaaatccacgctgcggatgtcttggctgaactcgagcgtctccagcccgttagccgcccagtcgagatagtcggcgaactcttcgcgggagaccgtacgctgctcggtggtcaggaagcggtagaacttcttccttttcaccaggtagttgagaaagctgtacgggttggtcggtgaaaccgcgctgaccagatccttgaggaaactggtttgcatatggcagtccggccccatcatgccggggtgccaggagaagtgcggtttacgttcgaagaacttgctgttaaagccggtaacctcactgccgagtgcggcaatgctcagattgaatgggccgacgccgatgccgatgaaatccagaggctgattcattgggcaaactccttggagaccaaataaagagggttatccagatcttgcagatagttcggcaacatgcggctgccgccatcctgctctgaataggtgagtttcaccgggttgagtaccacgcgaataatctgcggcttgaaaaggtcgaacagggcaaagcggtcggccaactgcggatgctgcgccatatagcgctccagcacctgtgccagcacttgatagaaacgcggttcgcttatgccgcagccgctcatcagcggcgaaataaagcgcaaaacggtgacgaaatgcccggtttgcaggtcatggatcagatagtcggcaggcaggcgcaccgttacgtcttttaccacctgtggcagtgaagcggcctgtgagaagtcctgatctaccaggcgcatatcgccctggaaatcttttagcagtacccgctgcggtacatggtctttcatcactagtgtgatgttctggccgtgggcgatcagcgccaccccgtagcagcacatcaggtggtacatcggcagcacccccgcctggaacatctgcgccagccacgcctctgcgctcaggccggaacgggcaatgtaggcagcgatcagcggctcaccctgattgtcggtttccatcagcgtagccatcaggatcgcctgctcgcccggttgcagataacaggacgggttttcacgccagatcaccccgagcatttcctgataacgatagggggccttgggcagtgcgccgtaggttgggtgggccagatagcccgccgccggttcacccaggatctgggcgccgctggcctgcaaggtgctgtcactggcgaaaatctgctgtaaccagcgtgaagccgcaggcccggcgctgatgtacttgcccggaatgccgcgatagcaggaggtgttgtaaatggtcagcggcagcttgatatcgaagggcacccggcggctggtgttggtcaaagtgcgcagggactgctgagccagatagcgatcgccaaactcacccagctcgaccagttcaccgctggccagctgtggcaggaaatgcagagcgattttttgctgccattgccatggatgcaacggcaccggcagccaatcgttattcaacttcaggtcgtgccagcggcggtcaaagcgctggcgctccccgctgtccatcgcgctgttgagcaagttttctagcgggaagtcctcgtcaatgcaccagacaaagctgctgcgtttggcggccacccagtgcaactggaactggccctgatattctggcgcatactgttgcaacgccgtcagcccccagccacgacgccccttgttgaagacgaacttcgggtgacctgccagcaggcattgcagcgcgtcggcatccagcgcaatcagatcgttggcactcatcccgtggcgagcggtgagtaactgcatgtcaccgcgtaacgtggcatacagatcttccaaatgttcggcgatctgcgcatcgtccatcttcagcacctgcgccagttgccgcagcgtttgatcggcggccagcggcaggccatcgcagctcaggctgttggcgtcgatgtgcaaccaaccccagatcccgcgtttggcgctgaagcggtaggtcgcatcacctagcgcaatctgccattgcccgtcgtgctcctcggcctgcaaagtgcgctcatactccagttccgccaggatcttggcgatcatctgcaggttaacgcgttgccaatcggcgtaatcgtggcggctcatacctgtccctcgcggaagaagtcatcacgctggttcatgatcagccgtgaacgcttatgggggaaatcaaactctttcagcgtgtggtagccagcggtgggcagatggcggaacagccgctgattgtctgcgcgtggctcggccacgacgcgagtggtgcgaggttcatccaggtataaatagtgggtcaggccacgtagccaactgcggatgtactgtgcgccacgccagtcttcttcaccgaccagcatgtgcaggccgcgatcgaacggctgccagcgatagtggcggccaatgcgatcttcgggtgcccagtaaacttcgaaatagccaaacggctggtcgtcaaagcagcccagcaacgggtagcaatagctggaatccagctggcgctgtaaataggcggcctggacctcgagtgggccgctcatttcccagaaggcgtcaacgcggggggagttcatccaacgggtgaactgctcggcgtcgcgctccacttcgggcaaacggaagctcaagctacgtttgatttgcggatcgtagcggcgatacacctcaccgctgggccgtgcagggcgctgcggaaaccacagctcgcgctcggcatcgtattgcatttggccgccagcggtatggcgttcggcgatcagccacagcggcagttggtagaaggtttcacgggccaggtaatcaccacaggcctgggagaacagtgccagagcctgtggctcctcacgccattcggcatagggcagggcaatgccgctcagctgtggagccgcgatcagcaactgatccaacgcctgaatcagccagcctgctggcagtgagcctgggtaatgcaacgtagcgctgccgtccaatcccaggctaagggacaggtttttccccagcagttcgcagcggaatccgctggtggcgtggacaatcttggcaacgggcatcattgagcggcctccacgcgcagcggattggtgaagtcaaagtagatcaccgccggatcgacaatggtgttctcattgtgatcgtgcaaatagcagaagaagttgcccttgcagttccaatgttggctgtcgaggacatagtccaggcaacgggtatttttcgccgtgttacgcagcgtggttaacgcatcccgtactcgtctcatcaggctctcttcactgtcgaaccctgctgctgccatagcggcggtaacggccaacgtcgaattcaccagcaggtagtaggggaagtagcgtaacaactgctgctcgctaaagcggttctccgcttcggcttcgccgatttcatccagccaaggcgtggcatcgcgggtaaagccgctgccctggcaatcgcggtacagcatgcctaccggcaagtcctgctgcatttccaccagaatgttttgctgatgggccagcagtaccaggccgtagtcggcttcggcgctgaacagcggtagcagcacctgctggcagtaagcgtccagccagcaatgggcggcctgctgcaatggcaagtgcaggcgggcagccaggcggcgcactgccgcagctaacaggctatcgccaccgtctggcgctgcttgcgtcaaggtgaccaacacgttggtttgattctgtgcctggccgaacagcaggttatcgcgcagcgccatcaggctctcttcctggattgtgccgtctgcggagcgtaacccggcccagccatcttcctgcatcacgcgcatcgttggataacgagcttgcagctcctgccagcggggggtctttgccagacgtgcgagacgcatgccgcgtttcacttctttgaccgacagggtacgcaccgagttggttagccgtacgctgagggaaaacttgatcatgtcgcggctgcccgcgtgatatagcgaacgtgaagagctggttggcaaccaacgctcaccggcctcacccagatcgcacagcttgtgctgctcgaccaactcgcggcaccagctttgtgccagcagataatcggcctgccatggatgcattggcagcagccagacgtcatcggtaaaatggcctagcaactgtggtgcgctttctgcggcgaagcgttgcaggcgctgctgtaacgtcagatccaggctgtcgccacacaggtggcgcttttctaccgcaaaccagcgcagggggaagctgccagcaaaatctggcagatagcgctgtgcctgctgatgatcaaagggctcatgggatttcggagccgggtggaaggcatggccagctaataacccctgttccgcctgggcaaaattcagcggctggtcacgtagctttggccagtccagccggatggcgatcgcctgttgggtattgtcatgactttccagcactcgctggcgaaagcgtgccaaaacctcctcactcagttggccttttatcgccggtttggccagcaacagcgtaaccaaacgctcaaaactcagcgcttcaccgttgccattcaggcaggcggggaactgatattgatgatgttgggttggcgagatatgccgtaatggaatgcgtataaactggctatccgaaagtgggagatgtagctgaggaggttggctattggttgccggcacgatgtgccagtcccgagtttcacgcattagcgcgttgaggaaacattgcgcagccacatcggttgctgcgcttgctaactggatggtcatgacccttgtcactctggagcgattgagaatgattcttatatcaatagttcttattattatcaatcaccgcatgatacaattttttgattaatcacacacaaaaacatcattttcttaacggttatttcacttgatgcgcttattttcgggttcaaaaatcgttgcaattggtaatgattctccttcaaactggccgctggcgttttgtgccgggctattgggcattgggcaaaatggcttgctggttgcattacccgtgttggtcagcctgactcaactttcgttgtcggtgtgggcggggttgctaacgctgggatcgatgctgtttcttgtcggttctccctggtgggggcggcaggcagaaattcgcggctgtaaatacgtggtggttatggccctggcgggttacctgctcagctttgcgttattggccttggccgtgtgggggctgtctgctggctggctgcctgaaatggctgggttgggtggattgattgtggcgcgcattgtctatggcctgacagtatcaggcatggtgcccgccagccagacttgggcgctgcaacgtgctgggtatgaacaacgtatggcggcgttggccactatcagctctggcctgagctgtggccggttgcttggcccgctgtgcgcagccgtggcgctgtctttgcatccgatggctccgctatggctgatggcgattgcgccgctgatcgcgttactggtgatctgccgccagcataacgatcctcctctgcccgcggtggcgcatcaacaaaaccgcctgcggctgacgatgatgccctatttattgtgtgcgttgctgctggcgggctgcgtcagcctgatgcagttgggcttggctccgcatttgcagcagttgttcagccattcggcgacgaccgttagccaccatgtggcggtattgctcagcgtagcggcagggtgcacgctgttggcacagtttctggtggtgcggccacagcgtctcactccgccgcagctgctgatggttgccgctttgttgatgatcgctggcttggggctgatgtgtaccgctccgctggtgctgttttatctcggctgtgcgctggcttcgtttggggccgcgatggcgacgccgggctatcaactgatgctgaacgataagttatctaccggcaaaggggcgggagcgatcgccactagccatacactgggctacggcgcgagcgcgctgatggtgccggtggtgagtaaattttacggtgagtcgcagttggtggcggcggcactggtagccgccgtcctgttgggcggcattagcagctggctatggtgccagcatcgaatggcagacattgcgcgggagagtcagtgatatgtccgcaagctatcgcatctttgatcttaccttgaagcacaaggaaaatgtttccccctcgctgctgcgctgcgtgtttaccggcccagaggtacagcgcatgaagctggaagctccggatcaacggatcaagctgttgttcccggtagcggaagggcaaagctcgcagttggcgaatagcgacgattggtaccgcaactacatggcgataccgaaagagcaacggcccgtgatgcgtacctacacgttgcgggcgctgcgcgctgctgagaatgaaatggacgtggagtttgtgctccatggcattaatggcccggcctctgcctgggcaacgcatgccgttgcgggagataaactccaggctgtagcgccaaatgccgattttgctgaggatagcggcggctatgagtgggctcctccggcgcaaactcggcaggcgctgctgatcgccgatgaaacggcactgccagcggcgatgggtatcctcgaacagttggcgcagcaggttaacccgccgagtgtgcaggctttctttgaagtaccggtagcgggggactgcctcaatatggcgcacttcccatttgccgaggtttactggctgccacgtgacgttgggcatcagcaactgcatggcacgctgctggtggaggcggtacgtcagcgagtgaatatccctgcctcggcacgggccgaagcgcagtctctggctgaaaacagcctgggtggggatttgctgtgggagcgtgccgaaggggctaagaccttttacgcctgggtggcggcggagtcttcggtggtgaaaacgttgcgccgttacctgattggcgaacgcgatctggaccgttccacggtgaactttatggcgtactggtgttaagtttctgggcctactaaattgctgtgtctaatagcgcttcaggtggaagtcatgcagatcaatttcaactctggcggccgctttggctgctgtgctatgttccgctgaaacaaaagttacagcgggagtagcgatgaaacagattgatgaacgcctgcgcagcgaatacccgcaattggcccctcaagagcagcgggtagccgactttatcttcgatcactttgacgacctgattagctataacagcaccgagttggcgcgcctaagtggagtgtccaaggccacggtcagccgtctgttcaagcggctgggctatgccagctatcgcgcaatgcgtgacgagctgcgtaccctacgccaaagcggtatgccattgaccgacagccgtgacgcggtgcagggcaacaccttactagcccgccattaccagcaggaaatggccaatctgacgcattgggtaaagcagattgatgcggaacagtttggtgcggtgatcgcggccatggggaaatcccggcggctgctactgttggggatgcgcaatagctatcccgtcgcgatgcatttgcgccagcaactgatgcaggtgcgtgaacaggttttgttaataccgcagccgggccaaaccttggccgaagacctggtggatctggggccgcaggacatggtggtagtggtcgcatttcgccgccgtccacgcctggcgcgagaggtattgcaacagttgcagatcaagcaggtgccaacgttattgatctgcgaaccgcaggcccaggcgctgatcccgctggctagctggcatttgatgacgccgctcgatagcgtctcggcgtttgacagctactccagcgccatgagcctggcgagcctgctgagcaatgcgttgctgcatgacagattgtcgcaagggcggcagcgtattcatcaggtggccaatctgttcagcgatctggaggagttggagcagcgctgaggcattggttatcacgcggctaaacgggcgctatttgctgcgtccgttgattctttagttgcagataaataatttaagaatcttttgtttcatcctttctcgcttggcgataatctagcaataacaaaaaaccggccggtcgcagacgtagcaatctccgagctaagttattaagttgacaaggaatgaacatgctagctatcaaccaattcgatcaaatcaatcctccgcatcgcctactgatgggcccagggccgatcaatgccgatccgcgcgtgctgcgtgccatgtccagccagttgattggccaatacgatccggccatgaccggctatatgaatcaggtgatggagctgtatcgcggcctgtttcgcacgcagaaccgctggacgatgctgatagacgggacttcgcgtgccggtatcgaggcaatgctggtttctgccattcgccctggcgataaagtgctggtgccggtatttggccgttttggccatctgttgtgtgaaatcgcccgccgttgccgtgccgatgtgcacaccatcgaagcgccttggggtgaagtattcagtgccgatcggatcgaggatgcgatcaagaaagtacggccacgcctattgctgacggtgcaaggggatacctccaccaccatgctgcaaccgctggcggaattaggggatatctgtcgccgccacggcgtcttgttctataccgatgctaccgcctcgttcgccggtaacgagctggaaaccgatgcctggggtttggatgcggtatccgcagggctgcaaaaatgcctcggtggcccttctggcagttctccaatcacccttagcccgcagtttgaagagatcgtgcgccgtcgtaagtgcgttgaggaggggatccgtaccgtcgatcacacagacggtgacgacgagatgatctactccaactatttcgacctcggcatgatcatggattactgggggccggagcgcttgaaccaccatacggaagccaccagcatgctgtttgccgcgcgtgaatgcgcccgggtgatcctggaggaagggctggataacgctattgctcgccataaactgaatggcgcggcgatgttggccgggatccaggggatggggctggaggtctttggcgatatcgccaacaagatgaacaacgtgctgggcgtggtgatcccgcagggcatccatggcgagcaggtacgccagatgatgctcaatgacttcgccatcgaaatcggcacctcgtttggcccgttgcagggcaagatctggcggattggtaccatggggtataacgcgcggaaagactgcgtgctgcaaacgttggccgcgctggaagcggtactcaaccgtctcggttttgttagcccgcacggggaagctatgcaggcagcatggaacatttacgacgccgagcagaactgatggcaatgctgctgacccctctggaagcggaacgagccgcggccagagtgatggctcgctgcgacgaactggcggcaatcagcagcacgccaggccaactgacgcgggtttatctctccccagaacatttacgtgccaaccaactggtagggaattggatgcgcgagcttgggatggaggtctggcaagacggcgtgggcaatatctgcggacgttacgaagggcagcaaccggccgcaccggcactgctgcttggctctcatcttgatacggtgcgcaacgcggggcgctacgatggcatgctgggggtcttgaccgcgctcgaggttgtcgccttgttgcatagccacaatcggcgtctgccgcaggcgatcgaggtgatcggttttgccgacgaggagggcacgcgttttggcattaccttactcggcagcaaagggatcactgggcagtgggcagaggattggctgacatgtaccgatgctgagggcatcagcgtggctgaggctatgcgtgacgcggggcttgatcctgcggcggtgagttctgccgagcgtgcacaaggctcgatctgcgcctatctcgaactgcatattgagcaggggccttgtcttgaagcctccgatctggcgctgggagtggtcacggcgattaacggtgcccgccgcctcaacggtacctttactggacatgctggccatgcagggaccgtgccgatggggcagcgccgggatgcgctggctgccgccgctgaatggatggtcacggttgagcggctcaccatggaatacgatccgcatgtggtcgccacggtcggtcagatagaaagctttccgggggcagtgaatgtgatccctggacaggccaggctatccctcgacgttcgtggcccgcaagatgaaccgctagacgcgttgctggccgaattactgttgcaggcgcagagcattagcgcgcgtcgtggggtctgtttctacagcgaggagttctaccgcataccggctaccgcttgtgaccctcagtggcagcagcgctggcatgaagcagtaatgcaggtgcaagggaattgcctaatgctgcctagcggtgcggggcatgatgccattgctatcgccgtccgttggccggtggggatgctgtttgttcgttgcgagggcggcatcagccatcatcccgatgaggccgtcaccgtgggcgacgtggcgctagcgatccaggcttactgcctggctgtgggtataacagaccccnnnnnnnnnnnnnnnnnnnnnnnnnnnnnnnatgctcttttagaagtaaagcagacccgtcacgacggggggagtggctgctgcgtctgataacactgcccacatggctggccgaagctgcgcggatcacgctggcctcaaagggggctcatatgcggatgactttgtcctcataggcaaaggcagtaaagcacaggcggaggccatcagggaagaatgccggcgcgtgttggaagacagcccgaaactgaggctgaacatggacaataccaggatcacccatgtcaatgatggatttatcttcctggggcatcgtatcattcgcaagcgtagtcgctatggcgatagcctttatcatgctctcaagagtatcgagggtggcagggcatgggaaaagagcctcggcgtcagcgtgctcgcaccttagatgcgctacgttcatggttaggacattgtattgtcaaatcgcaagcttcgcttccactggggctgcatcaaaccccatctgggtcacgaattgaaggtcctgaactctgtgctacgcttaataccgtaattgatagtcaaaagtttgcacagggagtgctcaggaatattggttatcacgatgtttatggcctgcgctggacgctttgctgaatgaacgctaatcgtgacaatgtgacatggagggaccccgctgatgccagaagctcctcgcgaaaagtcttcatctactgattagcaaataaaggatggctcatcggtgacagcaaaactgctggccgcttggcgcggttatatcttcggcctatgttacgtttgcggcaaatacaacgaccattacattattgatatccaacacaaacagatgaacagcacagtgatactcggtatggaactgtggcattgaataacgatatttctttactggtgagctaacgtaatagctgttttcccctcccaacggtattgtaaggaagaaagaatgaactttgaaactcagtcaattggcaatgtcttggttgtcactcttttggacaggcgtttggatgcatcggtttccactcagtttaaggaggacatacaagccatgattgcgcaggggactcaccatattttactggacttcggtcaggtcgatttcatcgacagcagttttttaggcactctggtctctcttttgaaatccttacatggaaaaggtgagctcgcggtctgctcactgaacaacaatatccacagtatgttcaagttaacccggatggataaaatatttaccatcggcgctgataaaagcaacgcattacagcaaatctgataatcatctcattgattaaaaaggaatgttcattatgaaagccatgattcttgccgcaggtaaaggaaccagagccagaccgttgaccaccatattgccaaaaccaatgatcccattaattcgcaagccgattatggagtcgatcgttgagcatttaagagagtatggatttaatcagttaatggtcaatacaagctacctttccgcagatatcgagaattattttcgcgatggccatgcctggggcgtggaaatgggttactcctacgaaggggtgatggaaggtaatacctttgttgataacgtgctgggttccgccggtggaatgaagcacatccaaaatttctcgggattttttgatgacacttttgtcgtggtgtgtggtgacgcattaattgatgtggattttgatcaggtattggcttttcatcgggccagaaaaagtgtcgccaccctgatcatgcgccctgtgccagccgatcaagtgagtaagtatgggattgtcgtcaccaatgaccaaggccgagtcagtcagtttcaggaaaaacctaaagcagaagaggccttatcaaacaatgccaatacgggtatctatgtgtttgaacccgagatattcaattatattcccgacggtgttgaatatgacattggtagccagttgttccctaaacttgctgaattagatgttcctttctacggcattgtcttgccattccaatgggtagatattggctcattgcaggacttctggcatgtaaaccgcatgatccttaatcgggagttacctgattatccgatgccgggcattcaggttgcgccgcaaatttggtgtgggctgaacgttaaagccgattttgccaacctggatattgaagggccggtctatattggcagcagtactgaaatacagcctggagtgacaatcagagggcccgcgatcattggcgctggttgtttattagagcaaggggccatggtcgatcaaagctttgtagctgattacacccgagtcggtgggattgcccagttgtaccagcagatgatttttgccggtaaagtgatctcgccggacggtacagccattgatttgtctgatgccggtctgaactggcttattgatgataaacggcgcacagacattattacggcggagaagtcgttattcaaagagctgctcaccaaagatacctttctataaggggttctacgctggaagcgtctaaatggctctgtcgcattaacgaaaataagtcagcaaacgcgcaccgttgcaaaaatacggagatggtaaattgatctgcagcggcgtgcttctttcgtaaggtcattcgacactacggagaatctgcggtagtggccattgatcgaagtggtgccaacatagcagcgctgacgttacgccagggcgggttaagtgaagagacgctcaatgaaagctgtgaatgggtactgagtccagttgaatggacgttgctgtgggtgaaacaggaaggtaaaaccttgccaaagatgccgccgagtctgaagtgggcgtgcctgaatctggcgaagctggggcgttggtatgacagtaaacgaacgggacgagcaggatgggtagtgatgtgggagggatgattcaagcttcaggatatcgtcgaagggtataaactggcgaagtctcttgatcaggagatctgatcaagagacagctccttggggaggttagggtggggcattgactcaatcgtgcagttggaagccatctgcatcacgccaggcagggaacgcggcgcggtaggtttgcagcgtttccagcgaaagctcggcatccagcctcgccgcctggcccggttctgcgctggccaacctttctccctgcgggctgataatcaggctgtcaccgctgtaattcaggccattgccgtcctcgcccacgcggttacaacccgccacgtaaatctgattttcaatcgcccgcgccgccagcagcgtttgccagtgcaagctacgtgctgctggccagttggccacgtaaagggccagatcgtaatcctgctgatagcgtgaccacaccgggaagcgcaggtcatagcaaatctgcggcaggatacgccagccacgccattcgaaaatggtgcgctgtttcccagcctgataatgctggtgttcaccggccatacgaaacagatggcgtttatcataaccatgcaccttgccgccaggttccaccagcaggaaacggttaactgcccctttggcagttttcaacgctacgctgccacccaccaaggcgttggttttcaccgcccaggtatgtaaccagtctattacctgttgttcaggcaacgcgctttccccggcatccatagcaaagccggtggtaaacatttccggcagcacaatcagatcgcggccgctaatcgagggtaacaaggcatcgaactggcgcaggttggcctcaccttgacgccagaccagcggttgctgcaacagggtgatttttagagtcgacataggcgctccgcagcggcatccagcgtggcatcttgcttcgcgaagcacagccggatcagtttatgggggaacggatcggcacagaagacggacagcgggatcgccgctacgcctgcgtgctcggtcagccaatggcagaaggcgacatcatccagatcggaaatggcactgtaatctgccagtaagaagtaagtgccgtcacagggcagaatttccagcctgctgtcagctaacgcctgcacaaaacgatcgcgcttggcacggtagaacgcgggtagctgctgccagtgttccggctcgttgcgcagcatatcggccaaggctaactgggccggggtgttgacagagaacgtcagatattggtgaaccttgcgcacctccgcgctcaccgcttccggagccacacagtaacccactttccagccggtcatatggaaggttttaccaaacgaggaaacggctatcgcccgctgacgcagttgcggatgggccagcacgctggcgtgtccccctttggcaaagcagatatgctcgtaaacctcatcgctcagaatatagatttcccgatcggcgatggcagcccatagctgttgcatatcctctgccgaccaggccgtggcggagggattctgcggagtattaaggatcaccagccgtgtgtgcggtgaaagctgttcggcgaaccgttgccaatcgaccttgaaggctggcggctgtagggcaatgcgcttcagaacgccgccggaaagctgcaccgctggggcatagctgtcgtagcttgggtcgaagcaaatcacttcatcgccggagcgtaccagggcgctgatcgcagcgaacaacgcctcggttgcacccgcagtgatagtcacttcactattggcatcgggctgccagccgtagagctgagcagttttttccgcaatggcctcacgtaacggcgctgcgcccgtcatcggtgcgtattggtttgccccctggctgacgtgccagttcaggcgctgctttaaatactccgggccatcaaaatccgggaagccctgcgacaggttgatcgcctgatgctgctgcgccaaggcgctcatctgggtaaagatggtggtgccgaggtcaggtaacttgctggctgggacaggtgcggtgctcatatcaggctatttctcctggcgcttatgttgcgaacaatataacacggtgttaatatttggcaatcaagacgtatagacgtctatcctcgtcgcctagctaccacttgaaattcttagaggataagtgagtcacattcaatcaatcgccaaaagctacctgccaggaaatagagagaatgatggaaaacccgcaattatctgccctattggccgcctgccactggatcggtgagaaaggctggtgtccggcgaccggcggcaatatgtcgctgcgccttgatgcccaacattgcctggtgaccgaatccggtaaagacaaaggcagcctgagcgaacaggatttattattggtggaaacggcaaataaccacgtccccagcggccgcacgccttcggcggaaaccggcctgcacacgctgatctatcgcctctatcccaccgtcggtgccatcctgcatacccattcggtcaatgctaccgtgctttcccgcgtggaaaaaagtgaagcactggtgctgcaagggtatgaaatgcagaaatcccttagcggccagaagagccatctggacagcgtcagcatccccatttttgataacgaccaggatattccggcgctggctgcgcgtgtggccgcatttgccgaggtaacgcccttgcagtacggttttttggtgcgcggccacggcttgtattgctggggcaaacaggtagaggaagcgcgccgccaccttgaagggctggagttcctgttccagtgcgaactgcaacgccgtttactggaggcaaaatgatccgcgccatcgtcaccgatattgaaggtaccaccagcgatatccgttttgttcatcaggtgctgttcccctatgtccgtgagcgacttggggagtttatccgcagccatgccaacgacgccgaagttgcggctccgctggcggcattgcgtgcagagattgcgcaacccgatgccgataatgagctgcttattaccacgctttatcgttttatggatgaagatcgcaaatcgaccgcgctgaaggccttgcagggcatcatctggcgtagtggctacctgaacggcgattttcaggggcatctctaccccgaggtggccgaacaactggccgcctggcagcagcaagggctgaagctgtacgtctattcctccggttcggttgaagcgcaaaagctgctgtttggttacagcgatgcgggagatctgcaaccgcggttcagcggttactttgatacgcacgtgggggccaagcgtgaaagcgcgtcataccacaatattgcccaagccatcggtctggagccaactgagctgctgttcctttctgatatccatcaggagctggacgcggcacggctagcgggctggcatacctgccaactgatccgtgatgctgccgatctgcaaagccagcaccggcaggttaagcgttttgatcacatcgagttaggggagtttgtctaatgagtggattgaccatttttagcgataaagagccgcagcagccgttatggcagagccaggatgcgcaggctatccagcagcagttggcgcaaattggcgtgcgttttgagcgttggcaggccgatcgcgagttgggcgagaacccacagccagaagcggttatcgccgcctatcagcatgagatcgaccggctggtggcggaaaagggctaccagagctgggatgtgatcagcatgcgcccagacaacgcccagcgtgaagcgctgcgggaaaaattcctggccgaacatacccatggcgaggatgaggtgcgcttctttgtcgaaggtgcggggctgttttgcctgcatctggaagggaaaatcttccaaatcctgtgtgagaaaaacgatctgatttcggtgccagccaatactcgccactggtttgatatgggctcggcccccaacttcaccgccatccgcgtctttgataatccggaaggttgggtggcccatttcaccggtgacaaaattgccgaggcatatccaaagctagattgagtcccc

SEQ ID NO: 333 - DNA, 3429 bp, unknown
  Altogen  635822 strain
ggaggttttctgtgcacaaaaaaagccagcacggaggtggctggctaaaagtgggttcttcgagggaatatctttattcgctaaccatactcgccaagcggagcgatcgccatctatcagtgtgatagctggcgacaatcaatataaacactttaaaatcaatgtaataataaaaatacagctcataaaacacacaacattaaacaacaaatcacaacatttccgctcagtgtaatcagttagttacgggcaatagtgacctcatttttatacctgcgtcgaaaaaaatacccataccgcaatctactggctaccatttgctgatgcaaatcgaccaggatcaacgcatgcgtaagctaaccatcatggggcaggccattttcttcatgaacgagaacgaggcctacccgtctcccgatattgactcaagtcaatcgttctgcgtgtggctcgatgaggagggtcagtattggctcgatgttcattacaaccgggaatggcgtcgggcattcctggaaccgttcgccacctttgatggagtgttcgaagccgtaagagactacggctacggggagccgccgaagaagtgagcgtttgtcgcttagtgaggaagctattgggatagcttaaatcttataaaaaaccatgggtgtgggcaattgcttggttttgtagcaaaatacccattatttagttaaatgagcatcattatgtcttctaatgcacgagcctttaggcatgacatcaacggactgagagcctgggctgtcgttgctgttgttctgttccattttggcatacctggattcggcggcgggtttgtcggtgtagacgtcttctttgttatctcaggcttcctgatgacgcaaatcattgtcagcagcgtagaggcagggaagttttcgatatggcggttctacttggcaagggcgagaaggattatcccagccctactggccctctgcttcgtacttcttctactgggctggttcttccttacaacaacagactacacgacgctttcaaagcatgttttaactgcgatccttttcatatcgaatgttaaattttggaaagagtccggctactttgatgcagcatcacatgaaaagtggctggtgcacacatgggctttgtctgttgagtggcagttctacatcattttacccatcgcaattttgtttatgtggcggttctggaaagcacgagggatcaaattagcaatttttgctggtttcattctctcatttgcgctttcttgctatctggctatcaaaatgccatcagcggcattttttctgctgccaactcgcgcttgggaaatgctggggggcgggattgtatggtggctgactcgagataaagagacgtcgccaggcatggccaagctaatggaaacttccggcttcgccctaattatcttatcgatagtatttttcagtcccgacatgtattggcctggcttctacgcagcagttcctgtcgcgggtgcaatgcttgtgctcgcagctgctcggcaaaactccatattcactgccaactacgttgctgaacgaatcggggtctcatcatattcgatttacctgtggcactggcctgtagtcgtgttcttggcgtataacaatgctgctggattgtggacgtggattattgcggggatcgctgtaagtctgatccttggcgagctatcactaagactgattgaaaacccaacaagaaaagggctgtctaaacagacctcatggggcaatgttttaactattgctgcttgcatggcaattattggcggtacatctatcgcgcttttcaagataaacctacatgatagagtaccaaaaaacatagatctgattgcaagtgaaagccttaatattaagccaaacagagccgagtgcttctctgtgtctggaacaacgtcaccaggctgcatttacggtggaaaaaatattaaggtggtactcctaggtgatagtcatggtgatgccatgacaacggctgtagaagcgtcgttgcctagtaaatcagacggtgttctagaccttacctatgcaagctgccccaccatctttgcagcaaaagcggtccctggagaagtgccagagaatcaacactgttatgaattcaatcagtgggaacggaaaaaattggcatctatcgacaagtcaatccctgtagttattgtcaatagaacatcatcatacgcccttggcagacctacaatccccggtaaagaacacacaccgtttgtttatttcaccaaggtgtacaaaactcctgagccagaatttttagctgagtttaaaaaagaattggttaaaactgcctgcgaaatcgcagctgatagacctgtatacatggtgaggccgaccccagaaatggagcttaacgttccgaagacaatctcaagagctatgatgtttggcaaggaagttccgaggatttccatttctgaaactgaatatatgcaacgccattcgtttgcatgggcagctcaagatgaagctgctgcaaagtgtggcgtgaaaatactcaacccaattccactactatgtaaaaatggcacttgtgaaagcacatcaaacggacgaccaatctattacgacgataatcacatgagcgagtatggaaacaagttgcttgttcccatgttcaagcagatgttttaacattaaaatgtatggccgggtttttgcccggcctattattttaggttgtgctgtaataggaagccatattcccaataatcccttgattagcagaacccttatcactttgatagatgacaatttcagcaattttactgttggcgtttgatgcttccgttacagggttaatcccacgtcgggttgctccaatagttgcctgctccaagtgcatagccactgccgacatatcgactgccgatccaacagatctcccatcaatagcatatgctgttgcacctgagcgtattaaaccaccagaacgaccagccgttttcaaaccagtcgtagatgtgactgattttgaaacagctgacgctctaaccactcgtaataacatcccaacggcaccatttacacccgaatattgaccatttgattgaaaaagcaaaagatcgttatcactggcgacagcagaatctctagcagccatagagagcactgtgaatgatgatgccgtatttgtttctgcgacaaagaacattgatagagcggcgttttctgcagtgaatttttgtggtagagattgcggaactgaaagaaaatcatcgacaccgtcgaacatgattgatggttttccgttcagaagagccggggtcccgcctgatattactttaggttgaaatccggctgtggattgagttgcatgcaagccgttgccggtctgatcatagagagtaaccactgtgccatctccactacctacaaaaagcttaacatcatcgat

SEQ ID NO: 334 - DNA, 727 bp, unknown
  Altogen  635822 strain
  misc_feature (276)..(396): n is a, c, g, or t
ttcacgtcagccacccgaccatcggcagcgcggccatgatactcgtaggcaccggatggcccggcaacactgataccttcaaatgcctgcgggagacgtacccggtattcgctgtcggattccatgaccgccggtgtggggggcagtgtggtgtcatctgcgggtgtgatcaccagtcgaggagtatcaacattcgcgccaagctggtcgaggtcgctgccgctggcaaaggccaccatcaccgcgcgcgctgcctcattcacccgctggcgcagnnnnnnnnnnnnnnnnnnnnnnnnnnnnnnnnnnnnnnnnnnnnnnnnnnnnnnnnnnnnnnnnnnnnnnnnnnnnnnnnnnnnnnnnnnnnnnnnnnnnnnnnnnnnnnnnnnnnnnnnntcctccacaacatccggtgcgggaagctggcttaaatcgatggttggcatagttatcagctcagggggacggttaaggaaaacgtgccgctggcgtcgcggcgcacgccagtgatatcaacaaccatctggccattgaaatagctctcgaacgtgatggccgtcaggctgatgcgcggctcccatttcaggattgccacgtagcaggcggccatcccctgcaacttgaccgctgcgttttgcggctggtcaatcagagctgacaacagggagccatactcacgacgcatcacgcgcgatccaatcggtgtgatgagaatgtcacgcacgct

SEQ ID NO: 335 - DNA, 5900 bp, unknown
  Altogen  635822 strain
gtttcgccgtacagcgtgttgatacgagcggtaaacactactctgcgtgtgcccccgttatattcggtggtgaactcaaggatttcggtaacgccctgggtaccgaggatgcgctcacgtacggccatgttataggctggggatttgtgtttgccgaggatggactcgcgatacggggtgccttcggtcacatcgaggaaccattcgccggtccacagttcaaaccgggttttaactgcttgggcgaccgcttccggggtgttcgtcagaaacgtgttatcaccctggccaaacgtgtaatcgccgttttcgtcctcttttctgtagcgcattagcttacctcgtcggtttggccgccgccgcgttctacgccgccgtgcttgtgcgtctcatcgatacgtttgccattgccaaacacttggccgacaaatttcacgacacctgtaatcgtggccgcagtgccgctgatagcactgccgaccatgccccccatgaaagagaacaggccgtttaccttcacggccatcgagaactcagccagcggggtgatcacctcgagccccccaggggcaacgattttcattttcttgctggttgggtcgatttcaaggtacgtagaaccatcatcactgcgaaactgcgcggcgctggtgctgatgccgctgattttctgcgcctgcgactgcgggccaactcgcgcaaaagcgtcagcaagatgatgctgtcgtggatcaacaggctcttgtaccccaccgttctgccaccagtaatcaatgcagcgatcggcaaattccacaacacactcgtcacccggcttaatcgggaatgtcagcgtaacgccgccaccgcgtgggaactctacaggtacatccaccagcagcggcagcgccaccgataccacagatccatcagcttgccggactggcacttttaccgctggttgtatcgtggctgttacagcgtcagcgtcgaatgattggataatgcccggacatgcgacgcgcaaaccggtgctgatagaatcagccacggctttcagtaccaactcgggggaatcctggcgttcgttgttcgttatcatgctacgcccctgatctaatagctgactgactcaacaggcctgcgccacttttcgcaatacagatgatgtccatataccactcgttaccacgggtatcaccgtagtagctgatgttcttcgcaatatagtcgccgtccatatccagaactgccggttgctgtaaggatgcacccgctgtgctgccggtggcgatctcctggctggaaagccccaccagattgatagatttgttatcgaggcggattagcgtatcgagctggatattcgggtttatcagacaacggacattgatcccgccgttaattgtctgctccggcataccgatcaggcccgtctgtgcgttcaacacaatggcatcggccagataggtattctctggcaccatctgcaggcggccattctcatagcgccacgaggcccggcactgagccgctaggctggaaacctcatcacgatgcatgccgaacattggttttccccttggcgcttttgtatcggcaaattccggcgtggcccccgcaacaatgtcgtaaaccccgatcggcttcattagcgcagaatgaatatcctgttgcgtgtaaccggcggccagcgtggtgttgatcaccccgtagttgtgcgcctggtcagcatctgcagtctggatcacgatataggtgtctgttgggttttcgcggcccgtataggaatattggatttgcccggaaaaaatcagcccaaaattatcctgatacccagcggaaaagcggatttgagtaaactcgttccgccggatccggttgttagtgtctctactcaggttatagattttgaacatgccggtagctgggtagctgatgtccgggcgactgatattaaaactgattttcagcccggatagctcgagcccatcacccgcatcgtttgccacaattaggctgcattttcgcatccagttgattgacatatttcacccagaaaaaaaccgcccggcggcggctagttggttaagaaataaaggtgtgagcctatccccaaattatcctgcgtagggggatcaagcacattcggatcggacacaacaaacagcgccccaccgatcccaaggtatcgatactgcgccagcaggtcagcaccggcaaccagcgggataccctggatcagtggcgtcttatcgttgttcgcgatatccaacacccagcccgccgcatcacgccagatcaatgtcatttggtattgcacgccagcaagctgtatcgcgaactgctgggccgtaggcgtaagcgggatttcaatcagattagaaaccaaggaatccccctactgagctcaagatgctttctcgcttttccggagtggtggggtttttcaatcccgtattgctcacccctgcagtgtcctgcggatatttcatgttctctgcaggtgttgttgtgaccttttgcgtttcggtgatcagcagctctcgcagcgttagcgtggtcatcagcacgttctcgctggttttatcggtcagcacctcgatcgcgcggatgagcatattttggtactgccgtttaccggtggtaaccgaaaaaggcactttgctttttttcaggtcaagcaactgctgatagatatcttccgggctggtacccagtgaaagaccggtacttgcgttaaaaatttcggtggtgtcgatgtcatccagcaacgaaccgccgcctgcgaacccgagttccatcgtcacctctgctggccggtcataggcatgatcactcactggcgcgcctatctccacagggtgctcggtgacctccatggcatccatatgcttttcgcttatcgcaacactcggcacaatgacgccgatccggcgacgctgctgcgagaacagcactgataaaatatccatcagcccacctgtgtttgtagattgcgagtttgcctgcgatagacaccctcgaccgtattaccagtcaaccgggcagtttctcttgggtcaccaccgccagtgacattgatattgaatgtcgagtttccgccgttcgcctggcttccattagctccaacggtagattgagcagccttcaacaccatttctggcgcataaggatttttaccgttctcgatctgcgtgataccgttcatcagcattgcaagcacctgcggatcgtgaatattcagtgtttcaccgcggccgacgcccatcattttactgagcttatcaatatacttctgggtgttattttctttcggcggagcaaacctgctaatgatgtcttcgacagattgcaacttctggtaaccggccgccttcgatgtgccggtgtaatacgctttaatctgcttacccaacgcggtaaaaccgtcaaaggctgttttgaacttggcgaaacgcggggttgcgtggtcctcaagctgcgcgccattttggcccacataattcaagttaccggggttattgttgcggatcccgcgagggtcattcgcggatgtttctcctcgcaaccatctgcctacgcttctcggatcgaaccctgttttttcctgcacccaatcagctgcaccatttgcgctatcggtgacggcaggtaaggcgtcaggttggtcacttccctggttaatcagcgccttccctattctgccgacctctttccaattaccgtctttcagcgcattgatgagatcgccaatcattgacatcattttgccaaattcgccgaactgttttgtcaggttttcaacatcacctttcaacgtccaggttttcaggttgatgttaaggagctttgcgacctccttaccaacacccttgattgatgtcgccagttcgtccagcgctttaagtgcagcgtcgatttcgggcttccattggccccagttgatcagactttttccgccttccttccacgttttgtagtcgtcatacaatccaatcagcgatattgccaatgcactgacaatgccaatgggtgatgtcacgaatgcggtattcagtaatcgccatgcaaccaggacaccgcctagaatttttatcagccctttggttttatcatcgagctggtcccaccatttcatcagcgagccaaatccctgcactcctcggtagacaaacgtcatgatactatcggccagtgaaagcacctttttcagcacggcagtgatcgccccttcaattttggggaaattgagcaggatgtttttgcggaagctttcaaggttacctgccagcccgccagcaaggttactgcctatcttgtcacgcataatgccaaacagcgacgtgagccctgtcatctgcgtcatgaaccggttggactgttctgcggccttctgcgaatcgaacccggtcgctttcaacatcccctgataatcagcagtgaacccagccacgccacgccgcatcgccaacagtgtgttttcgtcaatgccgaggatctgcgcatattgattggcacggtaatacggcatcttggccagcttatcgccgaccagtgtcaccagttctgccgtgtcgcgcaggttaccattggcatcgcgtgtctggatccccagattacgcaggaagccttctccgcctggtgtgctccgcaagaatctggccaggttttcaagggtgccgttgaacccctcaatgctgccgcccgactggctgaatgcgtatccaatcgcccggatattgttcgccgtggcaccggtgcgctgtgactgccaatagagcttgtccaggctgctggcgattttagtggtgtagccaacgatcgccagcgccgcaccttctacagctgcccccagctttatggcattgagtgttgcgcctgtaactaccgactcaaacttgcggctgccagcctcatcgatatcgaaccccagcgagattaaaaagtccttgatggtttcagcgttcattgtcttcctgccattttttcaacagatatcggttttccgcttcaacatcgagcgactcgttcatcagcgctatatcggccagcgtcagggtgccatccttgagggattcatagctgcacatgcgggcatgaaccgggcgcagcagaaaactacgcccgtttggcattgactcagtcgctattcctgtggattgtccgtattggtggcgctccctggggctgcgggaaaaaaatccccgagagagtcctgaaccactcggccaacgatggaaaccagatccaagccattcaggtcgtcaaacagcatcacgccttgggatggctcgtaaatctgtgaccacaatttcccctgctgacgagtaaccaccgccaggcaggcaccgttgatctcattgcgtccctctttgctcagttgggaaatagccttcacgaccaacgggatgatctcatcgaaaaggcggtttttatcgtccgccagttccttgccttttccattcatcacatctttgagcagtggcactagcccagagagaacggacgccaaagcgatcgctacatcctgttgggcaaaagcgtttaatttggccgcacgatacttctgacccttgatttcgaattccatgcattactccttaaaacgtgccaagcagttgatcgactttcccagcgtcaaatacccacgccaccgtgccgccgtctttggcgttctgccaatccggtattttctggaaagccaccgagcgagccgagcacagatcgttactggcgctgttgcgcacaacgatcacgttattgccccacgtggcagacgaaagcgactgagccgcatagagggcgctcagtttcgcgttagtggggctggtcttgagcagggtcactgtgatggtgccgcctttacctgcatgcaggctgtgcatcacctcaccgtcagcaccgatggtcatggtgtt

SEQ ID NO: 336 - DNA, 44772 bp, unknown
  Altogen  635822 strain
  misc_feature (5837)..(5837): n is a, c, g, or t
ggcagggtgaacccggtgctgcctcaccctaaccactatggccagcaaagtatgttgatgtaagcaaatcgccccggaaatccggggttttttcgaagtgtggtcaatgcgtggacatggcatgaaataaatccttttatttcataatgataacttcatattgcaaggcctcgttcgaggccctttaatcgtcttaatcacccttaaataaattagatttgttaatcatttcagggtggttgatttttgatcacctttatcggtgtgttcctagggttttaagctattttatctgagtattttaccttttcgcgagatgtttaacttcacatttcatatatgtcattgttattgattaggttgttgtgggttttttaggtggtgaataaaaatttcattaatgttattaatgttaatcgtaagggagaattgaaattaaagggaggttaggggcgtgatggtaatagttttattgatagtagtgtacgtttccgtcgcttttgaggtcgataggcgtaagcgtatctgtattagtcttggtaaaaaatatacctacagaaagcgcatcaagttcaaaaggaaatgtgtaaggttaatcgatacgctgcttttccgaacatgataagttgcggtttaccctatttgaccaaaaagcagatttcttcaggtgaaatgccccggaaaagcggggcattttagattgatgaccaagaagccgcagctatttgacaccgccaatgcctgttaacagtttgcaccgttatcgatctcgtcagaatctcgatctactacccgtgagcagacccacgcttttgtgatcccgtctataaaaagtgtcaaatccgctgtatgcattcagcggctgctttaatatggtctttgtaattgagcattcgtcaaaggacattgccatggaaaaaatcgacctgcatatgcattccaactacagcgatgatgcagacttcccggttgagacggtgattgcacgctgcatggccaatggcatcagtacgttggcggtgaccgaccataataatgccaattcggtgccggaggccaaggcgctggcgtcgtccagcctcaatgtcctgtccggtatcgagatcgactgcaccttagctgggcgtaacttccacctgttgggttacgggtttacccccagcaatgactttgtggaaatctataataatttcagtgccattcaacgggaactgacgccgctaaagtttgccaaactacgcgggttgaaattccatctggatgagcaacgtctggagcaggtatgcggtggcgctatcccgcaggaagagcagatgggtgaagtgatactcgacgatccgcgtaatgacgggcatccgttgctgatgccttatcggcccgggggggaaagggccgatatgccactaatcaatttctattgggacttttttggcccaggaaaggtgtgctatatgccggtcacctatcccgctatgagccgcatggtggaggtgatccgccataacgggggaataccgatcctggcacatatcggtgccaacgttaaacaggaccatacccaagtcatcgatgaaatgttgaagattggtgtgatgggggtagaggtgttctcaagctatcattcacccgaattggctagccagctgtatgagtttaccgtgggccgctcggcgtttgttacctgcggcagtgacttccacgggcgtaacaagccaaaaatagaagtagggcaatgtgcttacggcccgcagcatattggtgaaatacgccggtttgtcgccgccgccagcgcctaggcattgttccattccatatgactcgtgggcggcatcggctgctcacgaagcgcgcagttaaccgccgaaatatagaccattccagagattttctttatcctttgccgtccttttatcaggtaggtgaatttctctcgccattaatatcctgttttatataaacattctacggagaagggagtttccgtcgggcgcaatcgttggcgctgtagattaaggtaagctgtctcatgagtacgatttctccagatcatggcaggttggccattgcccaagctgccaaatggaacaagaccgacaccgtctggatgttcgggctttacgctacggccgtgggggccggcaccctgtttctgccgatcaatgccggtctgaatggcccgctggtgctgctattgatggcactgttcgctttccctctgacctatttaccccatctggcactaacccgctttgtcctttccggctccagccgtgatggcaacattcaggacgtggtggtcgagcatttcggcgtgttagccggcaagatcattatggtgctgtacctgatggcgtttttccccatcgtgctggtctacagtatttccatcaccaacgcgttggacagcttcctgactcaccaatttcacttcaacccggtaccccgtatctggctgagtttggcggtagtggtggtgctcaatctggtgctgttgcgcggaaaggatactattgtggccgcgatgggcgttctggtattcccattgctggtgtttctgatggggatttcgctgtatctggtacccacctggcagaccgagaactttgtcagtggtttggccaacacgcaatttgacagccccgacctgtggcattcgctgtggttggcggtcccggtgatggtattttcctttagccatgcgccgatcatttcgtcgttcgcgtccacccagaacagcttatatggcgacaaggccgagcgccgttgtgcgcggatcatgcgttacagctacctgctgatttgcgtcaccgtgctgttcttcgtgttcagttgcgtactgagcctttcgcaccaggagatggagcaggcgaaagcgcagaacatcacggtgttgaccaccctggccaacaagttttccaatccgctgattgcctatcttgggccggtgatggcgatgttggcgatggcaaagtcctatcttggcacgtctctaggcgtaaccgaaggcgcaaccagcctgattgatgggctaacccgcgccgttggaaagccgttaaatgccaggacgactcatcgtatctccggcgtggtgctgttcttgctcacctgggcggccaccgtctggaatcctagcgccttgcatatcattgaaaccatcagcggtccgctgattgcggtgatcctgtttattctgccgatgtatgcggtgcgcgcggttccggctatgcgccgttatcgtgccttgagtaatgtctttgtacttgtgatggggttgattgcactttccgctttggtttacgggttggcatagcgatcaaattggccccgcgactgcggggccggttgggttaggtcattggcacataggtagagatcagctccaacacgccgttgataataaactgtacgcccatacacaccagcaggaagcccatcaggcgggaaatggcctcaataccgctttcgccaaccagtttcatgatcgccgtggagctacgtaaacagacccacagaatgatcgctatcgacaggaaaatggccaccggcgcggccagcagcacccagtgggcaaagcccagggtattttcattgacgctggatgcggtgctgatgatcatggcgatagtacccggcccagcggtacttggcatggccagtgggacaaaggcgatattggccgaggttttcttgcgcaattctctgcttttggtttctacctccggtgtttcatcggcactttgctgtgggaacaacatgcgaaaaccgataaaggcgacaatcaaacccccggcgatccgcagcccggggatggagatcccaaaggtgctcatgacaagttgaccggcatagaacgccaccgtcatgatgcagaacacatagaccgaagccatcagcgactgatggttgcgctcttcgttggtcatatttcccgacagaccaagcagcagcgccacggtggtcagcgggttggccagtggcaacagcagggctatccccagcccgatggcctgaaacaactgcagaatactcgacataaaacaaaccccagcaagagaatgaaatgggggcgcagtcactacgcccaaaaagtattgtgactaccagcgtcagaccagacgctcaatttttctgtgtcgccataccagcctataaaacgttgtctgcaatgccagcattgtcaaataggcgatagggaacgccatccataccccctctaatccaaagtgattgctgagcagataggccgctggcaactgtacggccactatgcagagaatggagatcgtcaccggcaccaacaccacgccgctggcgcgcatgatgccgccgacaatcgcctggaaaccaaataccagcatgctccacagcatgatatgcaataaatgctctgcttctgccaataccaccgggctggtcaggaacaaacccagcagccaatgtgacagcaggtagaccagaataatcaacgagccggtcagccagaggttgatatatagcccggtacgcaagataggagcaatgcgctcggttttgccagcgccgatggcctgagcgcctaaaatagaggcggtgatggcaatcgacagggcagggaattgcacatagtttacgatctgtgtcactgcgccgtaggctgccgtggcatccgaaccgtggcgattgaccagcgtcaggatgatcagctcagagatagaaattaccaccatttgtaaaccggtgggcaggccaatacgtaatactttgcgtagcaccaccgtatccagcttgagcgcggccagcatggcccggtcgggggccaacacgtgttttttgcggcgcagacgcaatgtcagatacaacattgccagtgcgttaccgaccatacccgccagagccgcgctctgtatgcccatgggggcaaagcccagccagccacggatcagggcaggtgtgagcagcaagccaacgatggtagacagcagcagggccaagagtggtgagaccgtgtcactgacgccgcgcagcaactgggtgaacaacacaaataccagcaataacggcataatcagcatcatgatgcgggcgtaagagaccgcttcttccagcacgtccgctggcgtgcctagcgcttgtagcgcctggcgggcaaacagactgccaaatactgccgccagtaagccaagcgacacgcccagcatcaaggccgtaccggcaatggttttcactttttccggttcattcgcgccccatgcctgcccaatcagcaccgaggcaccggcaccaacgccaatcaccagtgagataaagaagaacaccaccgggaacataccggagatggcggccagcgcatgggtgccgagcatctggccgatatagatgccgtttagcgtgcctgaaaatccttgcaggaagttggacagcaccatgggcaccaaaaagatcagatagatgcgccaaagcggtggctgcttgtgctgcggaagggtttgcatttaatcgtttttcctgcgcctaaaggcctgtaacgagcactaacggtgctcataaataacgttattgtagctgacaaccagtgcgttcagcgggggaacgcatcgcgagtcatccaggccagatgcgcctggatatcggcaggccattgcgcaattcgctcggcaaacagcttgccgtcgtggccaaacagtgcgcgcgtggcttcttcatagcccggtaaagagccggcgatggcgctcataaagcgatagccgttctctttgatacggcgttcattatcctgctcgaccgtggtgcgtctggcttcgtcaaccagacgacgtagcgcagcagaagcaccaccgcgctgttgtgccagccattcnccccccgcgctgttgtgccagccattcccaatgacggggcaggagggtcacttcgcgggccactacgccgagtttgggccgaccaaccgagggttgagttgtcggttctgcatcaagctcagcgataccgccatcaggctggggccaaacgtaacctgctggccaagggtaatccacttgggagccggtggcatcatcaaacactaacagccccccggcagtgagatccatcgcagcaagcgcctgagcgacatcggcataagacccggcagccactcgttgatgctgcaagaaagcggtgcagctcggcgtattgagggttttcatatttttatatccgggttaaattattttacccgggtaatttgaccgagtcatcgtggtaagtcaagtgcgatcaattatgcagcagggtaaactgcgctttatttatcctctacagttttaatgttactattcgcgaggctgtgaacagccactggaggttcgggtgttattaacggaccaagttgtgcgtcaatctggcaattgtgggcgagatatgacgcataactgactcaacactaaccaaaatatctgtactgcatgtgatctgtcgtgtgggtcaccactgtagataaggaattatgaatgcctgttattactcttcctgacggaagtcagcgtcaatacgaccatgccgtttccccgatggatgttgcccgtgatatcggccctggccttgccaaagcctgtatcgccggccgcgttaacggtgaactggtcgatgccaacgatgccatcgaatccgatgcacagttggccatcattaccatcaaagatgccgaaggcctggaaatcatgcgccactcctgtgcgcacctgctgggtcatgcgatcaaacagttgtggcctgacaccaaaatggccattggcccggtgatcgacaacggtttttactatgatgttgacctcgaccataccctgacgcaggaagatctggatctgctggagaagcggatgcatgaattggccgacaaagattatgacgtcatcaagaaaacagtgagctggcaggaagcccgcgacaccttcgcagcccgtggcgaaagctacaaggtggcgattctggatgaaaatatcagccatgacgatcgcccaggcctgtatcatcacgaagaatacgtggatatgtgccgtggcccgcacgtgccgaatatgcgtttctgccaccatttcaaactgcagaaaacctccggtgcctactggcgtggcgacagcaaaaacaaaatgctgcagcgtatctacggtaccgcctgggcagacaagaagcagttgaacgcttacctgcaacgtctggaagaagcagccaagcgtgaccatcgcaagatcggcaagcagctcgacctgtatcatatgcaggaagaagcccctggcatggtgttctggcataacgacggctggaccatcttccgcgaactggaagcctttgtgcgcatgaagctcaaagaacaccagtatcaggaggtgaaagggccgttcatgatggaccgtgtgttgtgggaaaaaaccggccactgggaaaactacaaagacgccatgttcaccacgtcttcagagaaccgtgaatattgcatcaagccgatgaactgcccgggccacgtgcagatcttcaaccagggcctgaagtcttaccgtgacctgccgctgcgtatgggcgagttcggtagctgccaccgtaacgagccatccggttcgctgcatggcctgatgcgtgtgcgtggtttcacccaggacgatgcccatatcttctgtaccgaagatcaggtgcgttccgaagtgaacgactgcatcaaaatggtctacgatatgtacggtgtctttggcttcgaaaagattgtggtgaaactgtccacccgtccagagaagcgcatcgggactgacgaaatgtggactcgagccgaaaacgatctggccgctgcgctgactgaaaacgggattccgtttgaatatcagccgggtgagggcgctttctacggaccaaaaattgaatttaccttgcatgattgtttggatcgcgcatggcaatgtggtaccgtgcaactcgatttcttcttaccgggccgtttaggcgcgtcgtatgttggcgaaaacaacgaacgcgtggtaccggtaatgatacaccgtgctattcttggctccatggagcgcttcatcggtatccttaccgaagaatatgccggtttctacccaacctggattgctccagtgcaggtagtggtgatgaatatcaccgacagccagtctgattacgtccagcaattgaccaaaaaactgcaagatgcaggcattcgggcaaaagcggacttgagaaacgagaagattggctttaaaattcgcgaacatactttacgacgggttccatacatgttggtgtgcggtgataaagaggtcgaatcaggcaaagttgccgttcgtacccgccgtggcaaagacctggggagcctggacgtacaagaagtcgtagacaagctgctacatgagatacgcagccgaagtcttcatcaactggaggaataaagtattaaaggcggaaaacgagttcaaccggcgcgtccaaatcgcattaacaaagaaattcgcgcgcaagaagttcgcctaaccggcgtcgatggcgagcagattggtattgtcagtctgaatgaagctcttgaaaaagctgaggaagcgggtgttgatttagtagagatcagcccaaatgccgaaccgccagtttgccggatcatggattacggcaaattcctctacgagaagagcaagtcgaccaaagaacagaagaagaagcaaaaagttatccaggttaaggaaatcaaattccgtcctggcaccgatgatggcgactatcaggtcaaactacgcaacctgattcgctttctggaagacggcgataaagccaagatcaccctgcgtttccgtgggcgtgaaatggcgcaccagcagatcggtatggaagtgcttaaccgcgtccgtaaagacctgtgtgaagatattgatctggcagtggtcgagtccttcccaacaaggatcgaaggccgtcagatgattatggtgctcgcacccaagaagaaacagtaaggcttccaagtaatcgaacccacgccgtgcaagcgtgcgtgggttttattcgcctcactgattcgttgtttaacaatgcgaagtggatttaattaacatgccaaagattaaaactgtacgtggtgcagccaagcgcttcaaaaagaccggcagcggtggttttaagcgcaaacatgctaacctgcgtcatattctgaccaaaaaagcaaccaagcgtaaacgtcatctgcgtccgaaaggcatggtgtctaaaaacgatctggtcctggttatcgcgtgcctgccgtacgcataagccacattttttgaatctagaataagactttaggagagagcatatggctcccgtaaaaagtggggtaattgcacgcgcacgtcacaagaaaatactgaaacaagcgaaaggttactacggtgcccgttcgcgcgtttatcgtgttgccttccaggcagtaatcaaagcaggtcagtatgcttaccgtgaccgtcgtcaacgtaagcgtcagttccgtcagctgtggattgcacgtatcaacgcagctgctcgtcagaacggcttgtcttacagcaaattcattaacggcttgaaaaaagcttctattgaaattgaccgtaagatcctggctgacatcgcagtattcgacaaagtggcctttggcgcactggttgaaaaagcgaaagcagcactggcgtaagctggttgaaaagagggagcttgctccctcttttactgtttgttcccaatacagatattgacttttatcggctggcgctatcacactggttgccaatccatcgacaaggtactacctacatgcacgctgttattttccgcttctttttttactttagcgcctgacttcaggaggctttgcgcgtaagaaaagaaacggaaagtagcgcctaagcctcccaagtggaggcttttttgtttttggccaccttctgcgccttttgggcctgcggcacttgcttggctacggcttgaaattctttgaagatcaaccaaaggcgtgttggaataatagataacaattacttagggccacaaggccagaggaagaggaaagcaatgtcacatctcgcagagctggttgccaacgccaaggcagccgtagaagatgcccaagatgttgccgcgttagatttggtacgcgtcgaatattttggcaagaaaggtcattttaccttacagatgcagtccctgcgtgaagtgccagcggaagatcgcccggcagccggggcggtgatcaaccaggcaaaacaggaagttcaggatgcgctaaacgcgcgtaagaacgcgttggagtctgcggtgctgaacgcccgcctggcggcagagaccatcgacgtctctctgccggggcgtcgcctggagaacggtggcctgcacccggtcactcgcaccatcgatcgtatcgaaaccttctttggcgaactgggcttctcggtagagaccggcccggaaatcgaagacgattaccataacttcgacgcgctgaatatcccagggcatcacccggcccgtgccgatcacgataccttctggtttgacgcgacgcgcctgctgcgtacccaaacttctggcgtgcagatccgcacaatgaagaaccagcaaccaccgatccgtatcatcgcgccgggccgtgtctatcgtaacgactacgatcagacacatacgccgatgttccaccagatggaagggctgatcgtcgacaaggacatcagcttcaccaacctgaaagggacgctgcacgatttcctgaacaacttctttgaagaagacctgcaggttcgtttccgtccttcctatttcccgttcaccgaaccttctgccgaagtagatgtaatgggcaaaaacggtaagtggctggaagtgttgggttgcggcatggtgcacccgaacgtactgcgcaacgtgggtatcgatccggaaatctattccggttttgccttcggtatgggtatggagcgcctgacgatgctgcgttacggcgtcaccgatctgcgtgcgttcttcgaaaacgatctgcgtttcctcaaacagtttaagtaaggcgggaatatcacatgaaattcagtgaactctggttgcgcgagtgggtaaacccggccatcagcagcgaagcattatccgatcaaatcaccatggctggcctggaagtagacggcgttgagccggtggctggcgtattcaacggtgtggtcgtgggccacgtggtggagtgcggtcaacacccgaacgccgacaaactgcgcgtaaccaaagtcgacgtgggcggtgagcgcctgttagacatcgtttgtggtgcgccaaactgccgcgtgggtctgaaagtagccgttgctactgtcggagccgtactgccaggcgattttaaaatcaaagccgccaagctgcgtggcgagccttctgaaggcatgctgtgttcgttctccgaactggcgatttcagacgatcatgacggcatcattgagctgcctgcagatgcgccgatcggcaccgatatccgtgactatctgcaactgaacgatagcgcgatcgaaatcagcgttacgccgaaccgtgccgattgcctgggtatcattggtgtcgcgcgcgacgttgctgtgctgaaccaactgccgctgaccgagccggatatgagcccggttgttgccaccatcaccgacaccctgccaatccgtgtagaagcccctcaggcgtgcccacgttatcttggccgcgtagtgaaaggcatcaacgtgaaggcaccttcaccactgtggatgcgtgagaagctgcgtcgtgctggtattcgctcgattgatgccgtggtcgacgtcaccaactacgtgctgatggagctgggccaaccgatgcacgcctttgacctcaatcgtattgagggcggtattgtggtgcgtatggcccacgaaggtgaaacgctgcgcctgctggatggcaacgaagccaaactgcaggcagacaccctggtgattgccgatcagcaaaaagcgctggccatgggcggcatctttggtggtgagcactctggcgtgaatgacgaaacccaggatgtgctgctggaatgcgccttcttcagcccgctgtcgattactggccgtgctcgtcgtcatggtctgcataccgatgcttcacatcgttacgagcgtggcgtagatccggcactgcaacataaagcgatggagcgtgccacacgcctgctgatcgacatctgcggtggtcaggctggcccaatcattgacgttagcgatgagagcaccctacctaagcgtgccaccattgcgttgcgccgtgaaaagctggatcgtctgattggccacgtagtgccaagcgagcaggtgagcgatattctgcgtcgcctgggttgccaggttaccgagcagggcgacaactggctggcggtggcgccaagctggcgtttcgatatggagatcgaagaagatttggtggaagaagtggcccgtgtctatggctacaacaacatcccggatgtgccagtgcgcgccgatctggtgatgaccaaacaccgtgaatccgatctgaccctgaagcgcgtgaagaccatgttggtcgatcatggctatcaggaagcaattacttacagttttgtcgacccgaaagtgcaagcgttgctgcacccaggtgaagaagccctgatcctgccaagccctatctcggtagagatgtctgccatgcgtctgtcactgtggacaggcctgctttcggcggtggtttataaccagaatcgtcagcaaactcgggtgcgcctgtttgaaagcggcctgcgctttgtccctgatactgcggcaaatctgggtatccgtcaggatgtcatgctggccggcgtaattgctgggcatacccatgatgagcattgggatctggcaagaaagccggtggacttctatgatttgaaaggggatctggaatcggtattggagctgaccggtaaattatccgaaattcagttcaaggcagagtccaatcccgccctgcatcctgggcaaagtgcggccatttatttacacggcgaacgtgtcggtttcatcggtgtggttcacccagaacttgaacgtaaactggatcttaacggccgtactgtggtatttgaattggagtggaacaagctcgcaagccgcgccgtgcctcaggcccgtgaggtttctcgcttccctgcaaaccgccgcgatatcgccgttgtagtggctgaaaacgtcgccgcagaagatattttggcagagtgtaagaaagttggcgcaaatcaggtagttggcgtaaacttgtttgatgtgtaccgtggcaagggcgtagctgagggttataagagcctggctatcagtctggtgttgcaggataccgcccgtacactggaagaagaggagattgccgctaccgttgcaaaatgtgtagaggctctaaaacagcgattccaagcatccttgagggattgaacctatggcgcttactaaagctgaaatgtcagaacacctgtttgagaagctagggcttagcaaacgggatgccaaagacctggtagaactgttctttgaagaggtccgtcgagctctggagaacggagaacaggtcaagctgtctggttttggcaattttgatttgcgagacaagaaccaacgtccgggacgcaacccgaaaaccggtgaggacattccgattacggcgcgccgcgtggtcactttccgtccgggacagaaactgaaaagccgggtggagaacgccagcccgaaagagtaggttatacaacgccaaaaaggccgcgcaagcggcctttttctttgggcggtttaccaacctcacaggtcggcgctgcatgctgttcccgtctattaccatcattacctcgatgaccggcggtgccagccgctgctttcaccaccattcgttcactcagtccttcccctaaacgtccgaacctcctactatttgctgcaagacgttattttcaggtcgttatcctggccagtagggaagttgtgtagttatgccgagcagtcagaccttcactttgttacaacagtatcaacaccgtcgcgataaacgctatttgacctggctgacgctgggcgtcgtactagcgttcgccttcagcctgagcgccggggatctgtggatctggcctgcgcagtggttgagtgaacctgcacagctgtttgtctggcaattgcgtctgccacgagcgctggcggtgatgctggtgggggcaagcctggcggtggcgggggcggcgatgcaggccctgtttgagaacccgctggcagagcctgggctgcttggcgtatccaacggtgccggagtggcgctggtgctgacggtgctgttcggcaacggcctgctgccggtggcgctgatgagcatgaacgccatcgcaggcgccctggtgatgacctccctgttgctgatttttgcccgccgtcgtaggttgagcaacgcacgtttgctgctggtaggagtcgcactggggattgtgtgcagcgcgattatgacttgggccgtgtatttcagttcgagcctcgacctgcggcagctaatgtactggatgatgggcggtttcggcggggtggattggcggcagaaatggctgctgttagccctgttgccggcgctgctgtggctatgcgcgcaaggcaaggcgctgaacttgatggcgcttggcgagatgcaggcccggcagttgggcctttccctgcacatatggcgtaatctgctggtgctggccatcggctggctggtgggaaccagcgtggccttggcgggtgtgattggctttatcggcctggtgatcccgcatattttgcgcctcagcggtttgaccaaccaacgttatctgttacctggctgcgcgctggcgggcgcgggcgtgctgttagtggctgacgtggtggcgcggattgcgctgttttcggcagaattacccatcggcgtggttactgcaacgctgggagcccctctttttatctggttactggcacggacaaaaagcgtaaggtaaaccggctgccggtaatgaccggcggcgtttttctgtatcacctgcaaataaaaccaaaggaaaacatctgatgagcaaccccatttatgccattcccctgcaaaccattgagaaccaatctaccacactgaacgcctatgccggcaaagtactgctggtggtcaacgtagcgtcggaatgcggcctgaccaagcaatacgaaggtctggaaaaactttatgaaacctggcgtgggcagggttttgcggtgttgggcttcccctccaatgagtttcttggtcaggagccgggcagtaatgaagagatcctggcgttttgccggggcacctttggcgtccaattcccgatgtttgccaaaattgaagtcaatggtgagggccgtcatccgctgtatcgggaactgattgccgcacagccacaggccgtcgcaccagaaggcagtggtttcctggagcggatgagcagcaaaggccgcgcgccgaagcacactggcgatatcctgtggaactttgagaaattcttgattggccgtgatggtacggtgatccaacgcttctcaccggatatgacgccagaagacccacaggtgtccgaggccatcaaacaggctttggccaagtaaaggagcgaacagagccatgctgcaactcagtgaggtgggggtagaagggcgattagtgccgttttctgggcagatcgccgctgggttgcaggtgcacctgatcggcccaaacggcgcgggtaagagtacgctgttggccagattggcgggtatgctgccagggcttggcgaagttcggctgtctgggcgtttgctggaagcgtatgcggggaatgaactggcaaggcaccgggcttatctgtgccagcagcagcctccggttgcgctgatgccggtatttcaatatctcgccttacatcagcccgccggagcggacgaaagcgagctggagaacgccatcttgtatttggctcgtagcctgaagctggcggataaattatcccgcatgctgactcaactctccgggggggaatggcagcgggtgcggttggccgcggggctattgcaggtttggccgacagtcaacccgcgaagccaattactgctgctcgatgaaccgaccaacagcctggatgtggcgcaaaaggtggcactcgatcgcctgctgcgcgaattttgccaaagtggccgcagtgcactggtctgcgctcacgatcttaatcataccttgcaacaggccgatcgagtctggttactgcaagccggacggctggtggccgaggggatcacccacgaggtaatggagccggggttattatccaaggtttatgacgtggattttcatctgcaggcgataggggaacagcgctggattatgaccaaaacggcctagcgatgtttagctgctattttaaccgattaaatggaagttaaacgaaaagtaaacgtgctcgatataattaccctgcaagggcgcaaattctcacgttaatctcacaaaataagatggaaaatccacgattacctgctacgctgaacgggttgaaaaaaaataagtaaaaaaatataactgcataactcaatgattatgcaactaattattggttccttgatgaagaagttttacagaaggtttcctgataataatttctcccttaaggtttagttaagcttgcccaagtacattggcagttaatccaccagtgatcattctttgcgacgtttactattcgttaaatgtaaaagtcttacagtggcttaaagaaaatctagacgtttggggtttaattatggatcaattcctgcctttttcacgcccggcaattggggatgaagaaattgcggcggtagaaaaggtgttgcgttctggctggatcaccaccgggccgcaaaatcagcagttggaaagcgagttttgccgaactttcggctgcaagcatgcggttgccgtctgctctgcaacggcggggatgcacatcactctgatggctctggatatcgggccaggggatgaagtcattaccccttcacaaacctgggtttccaccctcaacatgatcgaattgcttggcgctacgccggtgatgatcgatgttgaccgggacactttgatggtcagtgcagccgatgttgaggcggccatcaccccacgtaccaaagcgattattcccgttcactatgcgggcgcaccattaccgatggatgaactgcgcgcagtggctgaacgccacaacctccccctgattgaagatgcggctcacgccgtaggcacccgtttcaatggtgaatgggtgggcgcgcgtggtactgccattttctctttccacgccatcaaaaacctgacctgtgctgaaggcggcctgatcgcgaccgatgacgatgagctggccgatcgcgtccgctgcctgaagttccacggcctgggtgttgacgcttttgaccgccaactgcaggggcgtaagccgcaggcagaagtggttgaacctggctacaaatacaacctgtcagatattcatgcggcgatcgctgtggtgcagctggcgcgtttgccagagttgaacgcccggcgcaaggtgctggcggaacgttacctggccgcgctgcaagattcgcctttccagccgttggggttaccagattatccgcacgatcacgcctggcacctgtttatggtgcgtgttgatgaacaacgttgcggcattgggcgcgatcaactgatggaacggctgaaagaagttggggtcggcaccggtctgcatttccgcgccgcccatacgcaaaaattctaccgcgaacgttacccacagctgtcactgcccaataccgaatggaactcggcacgcctgtgcactttaccgctgttcccagatatgaccgaagccgatgtcgatcgcgtggtcaatgccttgtcttccgtattggagtcttcccgtgtctcgcgctgaacctattagcaaagtttcggtggtgatcccggtgtacaacgagcaggagagtttacctgccttgttggagcgcaccaccgccgcctgtaaacaactattgcaaccttacgaaattattctgattgatgatggcagcagcgacaactctgccgccatgctgaccgccgcggcggaacagcctgatagctgcattattgccgtgttgctgaaccgtaactacggccagcattccgccatcatggcgggcttcaatcaggtcagtggcgatctggtgatcaccctggatgccgatttgcaaaacccgccggaggaaattccccgtctggtcagcgtcgcggaagagggttatgacgtggtgggtaccgtgcgtgccaaccgtcaggactcctggttccgcaagacggcctcccgcatgatcaatatgatgatccagcgcgcgaccggtaaatccatgggcgactatggatgcatgctgcgtgcctatcgtcgccatatcatcgaagcgatgctgcattgccatgagcgcagtacctttattccgatcctggccaacacctttgctcgccgtaccacggagatcgaggtgcgtcacgctgaacgcgagttcggtgactccaaatatagcctgatgaagctgatcaacctgatgtatgacctgatcacctgcctgaccaccacgccgctgcgtctgcttagcgtgataggcagcgtgattgcactgtcgggcttcgtgctggcggtgttgttgatcgtgctgcgcttggtcttggggccagaatgggcggcaggcggagtcttcacgctgtttgcagtgttattcacctttatcggtgcacagtttgtcggtatgggattgttaggggagtacatcggccggatttataacgacgtccgtgctcgtccccgctattttgtccagaaagtggtcggcgccaagccaacccaaaatactcaggaagaagaatgatgaaagctattgtatttgcttaccatgatatcggctgcgcaggcttgaaagcgctgacagaagcgggttatgacgtacaggccgtatttacccataccgatgatccaggtgaaaacaacttcttctcttccgttgctcgccagggtgctgaactggagctgccggtgtatgcaccggaagatgtcaatcatccgctgtgggttgagcgtatccgtgagctacagccggatatcattttctctttctactaccgcaatatgttgagcgatgagatcctgtctctggctccaaaaggtggttttaacctgcatggttcactgttgccacgctaccgtggccgcgcgccgatcaactgggcgctggtgaacggcgaaaccgaaaccggtgccacgctgcacaagatggtcaaacgtccggatgccggtgatattgtaggtcagcataaagtggcgatttccgatcaggacaccgcactgacgctgcacaaaaaagtgttggaagcggcgcagatcgtcttgaaagaacaactgccgaaactgaaaaacggtacggccagcctgacggtgcaaaacgaagcggatgccagctattttggccgccgtaccgctgctgatggtgagatccagtggcacaagtctgctcatgaaatcaacaacctggtgcgagctgtcaccgaaccttatccgggcgcattcagctatctggggcagcgcaaggtgatcgtttggcgcgcacgcgttctggataccgcgcatgataagcagccaggcacggtgctgagcaccaccccactggtaattgcctgtggtgaaggtgcgctggaaatcgtggctggccagagcgagtctggtttgtatgtgcaaggcagccgcctggcagcggaaatgggcatggtgagcgacgtacgtctggctgccaaaccaagctctgtgatgaagcgccggacccgcgtgctgatcctgggtgtcaatggctttatcggcaaccatctcaccgaacgtctgctgcgcgaagaccgctacgatatctacggtctggatatcggctctgacgccatcagccgcttcctggataacccgcgcttccactttgtggaaggggatatcagcattcattccgagtggatcgagtatcacatcaagaagtgcgacgtggtactgccgctggtggcaatcgccacaccgatcgaatacacccgtaatccgctgcgcgtgttcgagttggatttcgaagaaaacctgaaaatcgtccgcgactgtgtgaaatacaacaaacgcatcatcttcccgtccacttcagaagtttatggcatgtgtgacgataaagagtttgatgaggacacctcgcgcctgatcgtcgggccaatcaataaacagcgctggatctattcggtctccaaacagctgttggaccgggttatctgggcttacggggccaaagaaggcctgaagttcacgctgttccgtccgtttaactggatggggccacgcctggataacctggatgcggcacgtatcggctcatcgcgtgcaatcacccagttgatcctgaatctggtcgaaggctcaccgatcaagctggtggacggtggggcgcagaaacgttgctttaccgatatcaacgacggtattgaagcgctgtatcgcattattgaaaaccgcgatggccaatgtgatggtcagatcgtcaacatcggcaacccaaccaacgaagccagtattcgtgagctggcggaaatgctgttggccagcttcaatgaacatccgctgcgcggcaatttcccgccgtttgccggtttcaaggacgtggaaagcagcagctactacggcaaagggtatcaggacgttgagcaccgtacgccaagcatcaagaacgcgcgccgcctgctgggctggcagccgacgatcgccatgcagcaaaccgttgccgaaactctggactacttcctgcgtaccacggtaaaggaaggtgatggtgcatgaggaaggtcggcctgcgagttgatgtagacacctttagcggtacccgtgaaggggtgccgcgcctgctggaactgtttgccaagtacgatattcaggccagcttcttcttcagcgtcgggccggacaacatggggcgccacttgtggcgcctgcttcgtccccaattcctgctgaaaatgctacgttccaaggccgcctccctgtacggctgggatatcctgctggcggggaccgcgtggcctgggaggaatatttcccgatctttggggccgttgatgaaacgcacgttggagatgggccacgaagtgggtttgcatgcctgggatcatcaagggtggcaggccaaggtggggaagtggtccaaacccgagttgacacatcaggttcagttgggcgttgatgcgctgtcaaacgcgatcggccaaccggtccgattttcggcggtggcggggtggcgtgccgatcagcgcgtcgtggaggttaagcaaggttttagttttgagtataacagtgattgccgtggcacccacccgttccgtccgctattagagaatggccaaccgggcacggtgcaaatccccgtgactcttccaacctttgatgaggtgattggtcgtgagaccagcatggcggatttcaatgattatattttgcgagcgatagaaaacgatcgtggggtgccagtgtacaccatacataccgaggtggaaggcatgtcgcagtcggccatgttcgaacaactgttacagcgtgcaaaacagcaaggcatcgagttctgcccgctgagtgcattgctgccccaagatgtgtcatcactgccgttaggccgcattactcgcgcaccatttcctggccgagaaggctggttgggttatcaaaccgaagttgggggagaaaaggtttcatgaaagcgttgaaaggatcctgggccattgtattggccattttttttgccctggtgtatctgctgccggtgaatgggcggctgctatggcagccggatgaaacccgctacgccgaaattagccgtgaaatgctggcgcgcggagattggatagtgcctaacctgctaggcctgcgctattttgaaaaaccggttgccggttactggtttaacaacattagccagtggttgttcggcgatagtaactttgccgtgcgctttggctcgatattcagcacgggtctgactgccttactggtctttgctctggcctggctgatgtggaaaaatgcgcgtcgtgcctatctggcggtgctgatcttcctgtcgatggtgctggtattcagtatcggcacttacagcgtgctcgatccgatgatctcgctgtggctgacggcagccatggtcagttattacctgacgctgaaagcctccaccgccaaaggtaagctgggtgcctatgtgttgctcgggctggcctgtggtatgggctttatgaccaaaggcttcctggcgctggcggtgccggtgattgccgttatccccattgttattcagcagcgtaaggtcaaagatctgttctgctatgggccagtggcgattgtggtggcggtactgctcagcctgccgtgggcgctggcggtggcccaacgagagccggactattggaactacttcttctgggtggagcatattcagcgctttgccgaagacaatgcccagcataaggcacctttttggtattacatcccgatcctgatcgctgcggtactgccgtggttggggttattgccaggttccctgctcaagggatggcgtgagcgtgtgcagcgcccggagctgtttttcctattgagctgggtggtgatgccgctgatcttcttcagcatcgccaaaggcaagttgcctacctatattctgccttgcatggcgccgttggcactgctgatggcggcttacgccgaggattgcgcggggcagttacgtactcgggtattcaagatgaatgccgtgctaaatggcctgtttgggctgattggcattatcgcgttgttgctcatcggctcaggtgtgttacctaaagtgcatctgtttaccgccgatgagtggccgaaaatcgtgctcggcctgattgcctttggtggttggctgctgtttgccgtgatttccgctcgtgataacgcgaaacgctggacctgggcggccgcttgcccgctgctgctttgtctgttgatcggttacgctattccgcaacaggtgatcgactccaagcagccgcaaaacttcattcgtgagaatatagctacgctcagccagagccagtttgtgctggccgatcgcgtgggtatcgccgcaggcctggcctgggaactgaaacgcagcgatgtgctgatgtacggtgaaaaaggcgagcttacttatggcttggcgtatcccgatgcgcgcggccactatatcagcgaagaagattttgctggctggttggctgaggctcgcaaacaaggggatgtgtcactgatcatgcaactctcccgtggtgagcacgtgccgacagatttgccaacgccagacagcgttgtcgagatgcatcgcatggcattggtatggtacaagcagcagccatgatggcgtatttattggtgatcctggttagcctgttcacctgtgcggggcagctgtgtcagaagcaggctgcccttacctggcaacaggctggcgagcggcggcgggctttaacgctgcgctggttggcgctggcagtattgttattggggctgggcatgctggtgtggctaaatgtattgcagcgcctgccgctcagcttggcctatccgatgctgagcctcaactttgtcctggtgacgctggcggcacgctggttgtttaacgagccgaccacggtgcgccactggtgcggcgtggcgtcgattatgctggggatcctgatgatgagtctgcaatcatgaaaggttatctttggggggcgggcagcgttctgttagtcacgttggcccagctgttgatgaaatgggggatggggcagatcccgctgttgtcctttgccgatgttacctggccgttactcaaccagtatggaatggccttgctggcggtggccgccgggattttcggctatggattatcaatgctgtgctggttctttgcgcttcattacctgccgctgaaccgggcttatccgctgttgagcgtcagttatgcgctggtttacctggcggcggtgatcctgccctggtttaatgaatcggccaccttgctcaaaacgctggggacagtgtttattctgttcggcgtctggttgattaatagccatcgggcggaaaaaaaccgttaatagcggaaaaaacgctgtcgattcgaatatcttacgcacaaagcttgcctttttattatcttgggcgataaattaacgccaaacagcattctccttacctggagtggcgtggtgaaataccgcaggcggttgatccggttcggtgttcaagtgaaaggtaaaatgcgatgcgtgtgtggtttctattagccagtttaattctcgccggttgcagcagccatgcgcccccgccgagtggccgtttgtccgattccattgtggtggtagcgcaattgaacgagcaactgcgtcaatggtatggcactccgtatcgctacggcgggctggatcgcggcggtgttgactgttccggctttgtctatcgcaccttcagcgatcgttttgatatgcaattaccgcgctccacggcgcagcaaaccgggctggggaccaaagtctcgcgcgacgagctgatgccgggcgatctggtgttctttaaaaccggcagcggagagaatggcctgcatgtggggatctacgataccaacgacgagtttattcatgcctcgaccagcaaaggcgtgacgcgttcttcactcaacaacgtttactggcgcaaggtgtactggcaggcgcgccggatttaacgacccaaaccccctatctggtgtattatggcagcactgcatgatgaggtgactgccatgaattccttacgtttattgatttctgattcctacgatccctggtttaatctggcggtagaagagtgcatcttccgcgaaatgaccacgcaaaaaatcctcttcctgtggcgtaatgccgaaaccgtggtaattggccagtcgcagaacccgtggaaagaatgcaatacccggcggatggaacaggatggcattcgtctggcacggcgcagtagcggcggcggggcggtgtttcacgacttgggcaatacctgctttacctttatggccggtaagcccggctacgataaaaccgtttctaccggcattattttggcggcgctgaaacagcttgggattgatgcatcggcttccgggcgtaacgatctggtggttgaaacggccgacggaatgcgcaaaatttccggttcagcctatcgagaaacccaggatcgtggctttcatcacggtacgctattgttgaatgccgatctcaatcgcctggcggattatctcaatcccgatccgaaaaaattgcaggcgaaaggcatcacttctgtacgttccagggtcgctaacctggccgagtttgtgccagaaatcgaccatcagcaggtttgtgacgccgttattcaggctttcttcgcccattatggtgaaacggcacagccggaagtgatctccccggatgtcttcccagacctgccagattttgcccagcaatttgccaagcagagcagttgggaatggaattttggcaaagcgccagcgtttagccacttgctgaatgaacgatttacctggggtggggtggatatcttttttgacgtcgagaagggcgcgattgtacgcgcgcagatattcaccgacagcctcaaccctgcgccattacagactttggccgaaaagctggtgggatgtgcctatcgcagcgaggcgttggcagactgttgtgcacagctggtagcgcaatatccacagcaggagagcgagcttagtgagttgcagcgttggttgttggaaaccattaagtagtgctgtgtggtaaataagttaggaattttattaatgaaatcaggtggtcgccgcatcacctgatcgttgaacataaaaaataactcacgcattgcgtaaagcttttaatgtgtaacgatagatgccgcaaatataattatcgcacctgactgcctgaacaaaaaaacatcgctaaagctatcaattacttggcaacgcctagctaatcacattactatttatgaactattcccgagggattgatcggtataacttattgttatacgatggcttgcacgccattaagcctctggcattaaaatgaatattcaatctgacgttgattttattagtcagtacgtcttcctgccgatttacgccatgacgggaagattgctggcggtggaacttctcacccgttttactggctccggcggcaacccggcgatgcctacggagatcggcctgcggttattaaccccagaacaaaggattgagttattcaacgaccaactcacgctggctgaaaagcacgcgtcatggtttgttgccagcggggtgacattgaccattaatatcgaagaaacggttgtcgattggttacttggcagcgagacatgtcgtcagcgagtgcagcagttgccgtttattgcttttgaaattaatgagagttttcccaacctttccgcggggaaagacaacggaaaaatccgcttgttaagttcctacttttcgctttggctcgatggtttcggttctggcaaagcgacgttgaccgcgttgtacgatggtttatttgattttgtgaagatcgacaaacgcttttattggcaattggttacccaacagggatatgacctggttatcgattcactgcttaagaatatcaatcaactttgtaagggagttattgtttgcggcattgagaaacatgagtatttcaataaactgactaacaccggtgttttagggctacaggggtttttatggcctgccatcagtgtggataatctgcggtctctacgcaggattgctgaagagttcgataataatagctgatttttacttacataccggggtaaatagtggactggatgatttttaccgtgatcccagtactgataattattgtcgctttatcattgataaagcactttagccatgcgcgtagtaggtcattaaaagactcacgccgcaggcgctaaataaccaagctgcagctttttagtctaccgcgcccctgcaggttatcggccaggggcgaatcccttgtaaatcctccgtgttaatccgcacctccaggctctacactaagcgttacggagggcctatgccgcaatttgaaaacgcttattaccaacaactgcccggtttttataccgcactgcagccgacgccgcttaaagcggcccgtttactgtattacagccagccactggctcaggaactggggttggacgcaagctggtttaccccggagaaaacgccaatctgggcaggggaaaccctgttgcccggcatgcagcctttggcgcaggtttacagcggccatcagtttggttcctgggcgggtcagttgggagatggccgggggatcctgctgggcgaacagcggctcgtggacggccgcagtatggactggcatctgaaaggcgctggcttaacgccatattcacgcatgggcgatgggcgggcggtgctacgatcggtgatccgtgaattcctggcctccgaggcgctataccatctggggatcccgacgacgcgggccctgacaattgtcaccagcgaacatcctgtgttccgtgaacaaccggagcgcggggcaatgctgctgcgggtggcggaaagccatgtccgctttgggcatttcgaacatttctattaccgccaacagtcggagcaggtcaggcaattggcggacttcgttattgcccgccattggtcgcaatgggttgatgagcaggatcgctatctgctgtggtttaccgatgtggtggaacgcaccgctcgtatgattgcccattggcagtgtgtggggtttgcccacggcgtgatgaataccgacaatatgtcgatcctcggcctgacgatggattatggaccttatggcttccttgatgactaccggcccgattatatctgcaaccactccgatcatcagggtcgttatgcgttcgataaccagcctgccgtggggttatggaacctgaatcgattggcacaaacgctatccggtttgctgagtgccgagcagttacagcaggcactggccgcctatgaaccggcgctgatgcaggcttatggtgagcaaatgcgtgccaaactgggcttgtttacccagtcaaaacaggataacgatctgctgaccggcttattgagcctgatggcgcaagagggacgtgactacactcgcaccttccgcttattgagcgacgttgagcagcagcaggcgcaaacgccattgcgtgatgactttatcgatcgcggcgcctttgacggttggtatcagaagtatcgccagcgcttacagcttgagcaggtgagtgatgccgagcgccagcaagcgatgaagctggcgaatcctaaactgattttgcgtaattatttggcgcagcaggctatcgaagcggcagagcaggacgatgtcagcaagttggcgcgtttgcaccaggcgttactgcaacctttcgccgacgatgctcagtatgacgatctggcggccttgccaccggattggggcaagcatctggaaatttcctgttcgagctgaatgtagcaagccctccatggcttaccgttactgacgtaaaaacacctgcggcagtgcggtctccgggtgggcggcgacaccgagatctgcctgataccaacgtgtcaggatatctgtctgcaatacctgctgtggggtaccggaagcgaccaggcggccctgatgcaacaaaagaatacgatcggcatacagcgcggccagattaagatcgtgcaatacgcaacagaccgccaacggctgctgacgcgtcagggagcgcagcaggcgtaaggtatgctgttgatgatacagatcgagcgccgaggtgggttcatcaagaaataaccaggatggtgcgggttgcggctgccacaactgcaccaatactctggccagttgcacccgttgctgttccccgccggaaagctggcggtaatcacgttgggccaggctggtgcaatcggtctgctccatcacctgttggatcgcccgtttggcatcgcgcccgctatgcggagagcgacccatggcaaccacttcttccacggtaaacggaaaggccagttcgctgtgttgacgcattaccgcccggaccttggctaactgctgcggttgccattgttcaagcggtttaccttgcaggcggcactcgccacagtctgctgccagataaccggtaagtaagcgtagcagggtcgacttccccgcgccgttggggccgataatcgccaccatttcgccactggcgatgctgagggagacatcggtgatcagcctgcgatcccccaggttgtaacgcaattgccgtgctgtcagctttgatgaatcatccaccggtgcgctcccgctggcgcatcaccagccacagaaaatagggaccaccgatcaggctggtcatcaggcctaccggcatttctgccggagcgaccagcgtccgtgccagagtatcgctcaccaatagcaggcaggcaccgccgagggcagaggctggcaacaaccagcggtgatcgcccccaagccgcatacgcaccaggtggggcaccaccaggccaataaagccgatcacgccactcatcgctacggcagccccaatcagcagagcgctcaacagtagcaactgcagcttggcgcgttgcacattaactccaaggtaatgtgcttcttcatcacccagctgtagcagattcaaacgacgagcctgtaacagcgtcagcaatgcggctggcaggatcagcgaagcggacacgaccagggtaggccactgtgactggctaaggctgcccatcatccagagtgaaaactgacgtaattgctggtcgctactgaggtacgacagcacaccaatcgccgccatgcaaagcgcattgatggcgataccggccagcaacagccgagaaaggctgccgtgcccgctgcggctgatgccgtagatcagtatcgaaaccagcaagctgccgagaaacgccgccagcatatggctgtacagagcgatgagcgggggcagggccagcggcatgacgatcaccaaggccacgaacagtgcgccgccgctgctgatccccaacaggctgggatcggccaaggggttgcggaacagcccctgcatcaccgcgccggaaactgccaacgcacagccgatcaccacggccaacagcacgcgtggcagacgaatattcagccagatatgccaggaggtatcgctgagaggagcctgccacagggtgcgaaatgatagtgtcaacgcccccaggttagcggccccaagtgccaggatcgtcagcaagatcagcagactgccgatcgccaggcggggcgaggttcggcaacgcattacttttgctccgccgctttacgtaataggctcagcgtctgcggtgtttcaagaccaaaaccgagcagcgccatatcatcaacgatcagcacacggcggtttttccccgcgggtgtcagagccataccaggcaactgccacaggttttcctgaccccctatggagcgaacgccatcggtagtcaccaacagcaagtctggtgcgctggcaatcacgccctcttgcgagagcgggcggtaacggctgaaaccttgcatcgcgtttttcaacccagccgctctgataatggcatctgccgcagtttgctggcccgcggccatgggggtaatacccccgtgactcatcacgaacagtactttcaccggcagcggcgtattggctaccgctgccaactgttgctgatagcgttcagccaactgcttgccttggctactgcgattgatggcatcggctatcacgctgattttttcaggcaccgcctgcacggtggtatccccaggaatacgcaccaccttcacgccactgtcttccagctgcttcagcaccaatgctggctccgccaactcggtggtcaggatcagggtgggtttcagcgccaggataccttcggcattcagttggcgcatatagcccacgtctggcaatgtctgcaccgcagcaggatgtaggctggtactgtctcgagccacaacttcatcacccgcgcccagcgcgaaggcaatttcggtcacgtcaccccctatcgaaacaatcctctctgccgccacggcggctaatggaaatgccagcgcaacgcacagcgccaggcgaagaaacaatgaagctatcatgcggcgacatccttcggttcaagtgcagcaacctgttcacgccactggagctgctccgggtggccttcggtacgctgtccgtaaagttgggcgatctgggtgccatcggcggcaaatagctccaggctggtgaccatgccatctttggttggtttgcgtgtgatccagctttcggcgatcgccccttcaatcaggtgcagggtaaagtggcggttgaagatgttgatccagccgtcctgcggcatcagacgttcgatctggccggtaaagatctgcacgcagccccggttgccgacgaagatcatgatttcgttttgcgcagtcttggcggcttccaggatctctgtcagtgcgctgttgtccacgcgataggcaagatcgttacccacggcgcggaaggcctgctgacgggtcagattattacggcttagcagttggaagaactggtggacgtcggtcatggcacgccagtcggcatcgattttggcggtatccggcgcgctgttattctctttaatctcgaccggttgcagctccagtgccgagttttccgcagtctgatggcgctcgaccagggcgaaccaggcggcgaggtcggtttcgtcggtggtgtacaccttatgcagcgcatcgccttgatgatcaaagaactggatgctgtggcgcacgccacgcttgttggtttcactcagggcaaaaacgctgtcccattggttgaggaacaggcgcaaatccagctcgcgcgggttgaggatcagcccagcatggccattgaggtgctgattctgataacgcccaacttgctcgtgtaccgcatagctgttacgcgtgatggacttggtgacgccaacctgttccagttcggtcagcagcgtacgggcatcggcttgcaggcgacgagcatcgtggccgacgcgggcatgggtcagttcggcttcgctgatacccaacagctcggccagatcgcgggcatatttacctgggtgatcaattttcgcctgctcataacgttggtatagggtctcgctcattatttttcttcctgtgcttgtggggggaggagcgggcaaaaacggcctgcccgctgtggttcaatgggttaccactgatagctgaccagcagtttggcgttacgaccgtcctgcggaatgccctgtggtgagtaatattctttatcgaaggcgttccccaggaccacggtagtggtgacgccctgcaggtcttcgcggcctttatagcttaggtagaaatcgttcacgccatacccggcctgtttggtgtagccggtagccacgttatgcgcactctgtgcaaaggttccgacccagccggtggataaaccggtctcggcaataggaatatccaacacgctggtgaccgtatccgggttgacactggggagccagtcacccgtagtttcatcttttccacgtgtgcggttgtaggccagatccaaaccgaaccaccgggttttatagttcagcgaggtatcccatccccaaatcttggcgcgagcgatattggttgagaaggtggtacaactgatgcagtacatgccacgtggtccacggcctaactccatggtgacaccggtagtgatataatccctggctttggtatcgaagtagctggccttgaattgcaggctgtcgtcggccattaacagatcgtcaaagcgtaagccgaaaccgtattcctgcgtggcgttggtttctggcttcagatttgggttcggcacccaatagttggtgatcgtggttggccccatcgggatcgagaagtgcttggagtcattgtacatctcacccatggtcggtgcgcggaatgcctgagcataggaggcaaacatcatcaaccaatcagtaggggtaacgctcatcgcaccacgggatgaccacttgttggcgttgacgtcgtcataaccgtcgctagagcctttgaaattgtcataacgcgtcccggccaggaaagagacaggcaagtcgcgcagcgtgatctcatcttgcagccagccggaagcgaagttgatcttggcctgtgggaagctttctgttgcgccccccggcgtctgttcctgccggtaggcttcgctaccataggtgaacaggtgtgaagcgaagctgtcggcgaacaggcgggtacggttttccagcttgccacctttggtggtttgtttgcgtgcttcatctgcgctgccgtccgtatgcgcattgatctctacttcggagtaataaatcttggcatcggcatccagccaatcttggcctgtaggtttgagcttataaccgagctgtgcgtcacgctgaatcgtagaacggtcagttaacacattactgcttgaaacatcaggcgtttgcggatttttgggttcttgtgcccggttattgtaatagcgcaggttaccgctcagggactggttgtcatcaatggcccaggcgcctttggccagaacgttgctgatggtctcatcgttcggtgcattaaagccatcgccttggcgaatattgccgacatcgcgagtgccgaaagagatcaaaccatcgagatcgtcagttttaccgtaagcgctggcacccatgccaaggctatgatcgccgctagctgccgtgccgaacacgcggtagccggtgttatgaccgggcaaaagcagatcggcggcatcaacggtttcataggagataactccacctaatgcgccactgccgtacaacagtgctgacgggccacgcactacttcaatacgttttaccaatccaggatccaggaaggtgccattgatatggccggtatcggttccctgacgaataccatcaaccaggatcagcacaccacggcgatcgtaaccccgcatcatgatgtcttgcccattgctccggccggtaccggtcacggtaaccccaggcacatgacgcagcatatcgccggcggtggtggcggtttggctctgagggctgttgccgtcgatcaccgtcaccatcatcggcgcttcaaaactgctgcgctgattaccggtggcgaccacggtcatggcctcatctctgtttttttcttgtgccttggtggcagcggaaacactggtgtcggtctgagcaaaaaccaccgtaggcaaagcgcaggcaatggccaggcttaatgcggataaacgcagccgggaggcaaaaatggcaggcatgtgcaactctccgtatgactcaacatatcaatagatttgctggctgcctggatcgcaagatcggggtggctggcgttaaaaggaactaagacgttatttggttaagatcaattttcccgctttggtttggcgaagttgatagcgttgtccttgatggatgatcaccgccagcccatccgtgcccagtagttcggcactgtcgaagcagggcggtaaagcggcaggagcactgccgtcaggagtaaccaaagcgttgttggactgttggcaattattgagattgtccataaattcaaccggtaaatagtaattagtatcaaattgataatcattatcatgtgaacaaaaggttacatcaagggaaattttcttaccgatggaacctttttgtcgtcatgcttaccggagctagattgattgcgatcaatttgctgataaaacggctatttcaacagggtttcgatacggccgaacaggcgctcaggtttgcgtgtgatgcgctcgccatcggcggtgagcaggaatttggtgaagttccacttgatacgttggctgcctaacagaccgggagcacggcgttttaactcgctgaacaggggatgcgcctgcgcgccgttgacgtcgatcttgctgaacagcggaaagctgacgccatagttgagagtgcagaagttggcaatctccagcgggttgcctggctcctgcccgccaaactgattgcaggggaagcccagcaccatcaaccctcgtgagcgataatactgccacagcttttccaagcctgcatactgcggggtaaagccacacttgctggcggtattgaccaccaggtaggctcgcgccggaaagtcggccagcgttttatgttccccttgcagggtgatacagggaatggacagcagtgaatggttcacagaagggctccagatcggtttagctcggatgtttggccagtatagctgaatgacataaatctatcgcgtagaacactaactaaataattcggctaagatgttgcgcatacggtcattcagtattgaaatgaacagtttcatgttataaaaacactgtttccacgaacagtaaaaaatcagaatgagagatattttccaatataaacaatgcattgcactcaagtctttttatattaagagaacatttaaattaagaaaataatatatgaaataattctttttttcattaaaagacattgacacttgagtttttcaatgtttatcatcttattcatggtcaatgttctttaaatagggattatatgaaagggaataaaggaagtgttcttttattgactttaattggtatggcatcttttatcacccatgcagagacaccaagggagaatgtgagtgcagaaccggttaaatcaattttaaaaattgatgactttcttccggaaaagaaaagctggtcatttggagtcggggtaaacatcataaatgatagctctgatggaacctattccggggtttatataaatcaaatcagcccaggtcaatatgttatagaccgtacctcattaccgtataggagggaaaaaaatggtgtgtcaggatatttttcaggaatgtatgggttgacgcgccagctttcattatcagcaactgcaaatgggcaatgggtcaatactaaattttcattggaaaataatgatggttcaactaaaaatgagtacaggtttaatgggataggggttgggctaagttaccagttttatagactgtcagattatacggttttgttttctggtgcaaattttaaacatggatcgctacaaagttacgttcttggttcttctctcagttggatatacgatcctctggtacttaatctatcattaggttatctcgatggtatttcgaaggagaggtttactaacgactataaagtatacactatgtcggggaaagttgtctttgctataaatcctgaagttaatttaaattgggggttttctaaggatgccataaacgcatatagttatatttctagccagaaagagtggagcagtaaaacatccttattagctggcactacggtgaacttggctgaaaatgctattgctagcgttggtgttaaaggcggggtaggtaataacaaaggatctgttatatctcttggtttgaattatcgaatgtgaataggtgtcaacctttaccctgtcagaatgttataaatttatttcgcatagtattccaatatcctatctaacgcgttcagtatcgtaataaacatttaatgcataagggttgcgtatgatgaagataaaacaggctttatttctttgcgctttaggttattactctgtttttagtgtgaatgtgtgcgctgaaaataaaattgaattttttgatcaggataaataccgtaagttagaggcgctgggatatcattcgttctcaccattaaatatagaggagttagataataccaaaggtaaggttggacctctggttattggtgccattggggcggcaggaggtgctgctgggtcaattggtattgacttctcaaatggagcgcaaataaattgggggaatgcagccactgcggccgtcggtggttttgtaaccggtgcttcgggtgggttaatgggcgctacggtgtcaggggcggctgccagtgcggctttaggtgtaagtgctatgggggcgactaatgcggcgattggtggtggcgctgggagcgggtcatgttctagcagttgtcataagaagaagtaatatgaatatattcagcataggatttcttatcatggcaacatattgtcactttattacaggcgctataatatttatcaatgtaaagaaacatgtaatgctgttctcatcattgatactgcttttgtcagggttaatcagtggttatgttgtttttacctcgctttactcccttttgattattttaatggctgttgttatccactggctttctaaaaataaaatcataaaaggagttaaaaatatgggtgttatgtatgtaaatttatctgcactacccactattgtttacctggctaaatggataggttcatgatttggagtagaatcgaaagggttcactagtgataatgttaacatgacatttattgggggagcaattgaagagatggatagtgaatattatatattggctcatgctttttagcggttgtcaaacgaatgtggaagcaacctatctttacactaaattccgcgggggtaataaacaactatatgataacacctgcggggtggcatcctttgagtttattttaaggcagtattatagtattggtgcatcagaactaatgttgataaataaaataggtgttaagcctgagtattcactcttggatattagcatgcaatcaaaaataatggggctggatacaataggcgttaaaatcacatcaaaacaattaagacaacttcactcaccagccattctatacataaatagatttggaaaaaagcactttgtggtttttcatggggtggctaatggcgtcattcaaatatacgatcctgcttgggggtatattaactactcatttccacagttcgaaagttattggcttggagatgagcagttcggtcgcgcgctgctttttctcgataatattaacatcaatatcaacgaaagcctgatctaccaaaaagtcgttttgatagagtgatcacaatgcttgataaatcctatggtcaactgttgtatggcgaccgcagcagcaaatgagagccagcaggccaaaagcatgctggctaaaataatcagaaacgggtatctaccgcgtcggccagcatagccagcaactgctcgctgtccgaccagctcaggcaagggtcggtaatggattggccgtaggttagtgattggccagccacgatcttctgcgtgccttccaccaggaagctttcggccatcacgccagcgacggccacggagcctgcacggatctgttggcagacgttttccgccacttccaactggcggcgatgcaatctctgacaattaccgtggctgaagtcgatcaccagctgttcaggtaaatcaaactcgcgcaagctatcacacgcggctaccacatcggtcgcgtgatagtttggcgtcttgccgccgcgcatgatgatatggccataagggttgccgctggtctggtaaatggtcatctggccggttttgtctggcgacaggaacatatgaccggcgcgagcagcacggatggcatcaatggcgatgcgggtattgccgtcggtaccgtttttgaaaccaaccgggcaagagagcgccgaggccatttcacggtggatctggctttcggtggtgcgagcgccaattgcgccccagctgatcaggtcggcaatatactggccgatcaccatatccaggaactcggtcgccgttggcaggccaagctgattcactgacaatagcagcttgcgcgccatctcaatgccacggttgacctgatagctgccgtccaggtcgggatcggaaatcaagcctttccagcccaccacggtgcgcggtttttcaaaataggtacgcatcacgatttccaggcggtcctgatagcgctcgcgcaatacgttaaggcgggtggcatagtccatcgccgcatccagatcgtgaatggagcaggggccaatcactaccaacaggcgtttatcttcgccagttaggattttttcgatacgtttacgtgacgctgtcacgttatcggctaccgatgctgagatcggcaacttctctgccaacgcctgaggcgtgaccaagctgtcgatgcgcgcggtccgcagttcatctgttttgtgcatgattgtctctaaaacttgttcttcgcgacggcaggaataccgggaagtgatggcgatcacaataacgcaaaaaccgctgaattcaaccgtagagattgtgatctgctgattaaaaccggtaaaaaagcacaaaagaggggcatagacgactatccgccagcccctactatcagaacatccgccggctcatcccgaggatatcgaggatcttggtggagatctcctccaccgaatagttggtggtattgagatagcggatctgatttttgcgaaacagcgcttctacttcggcaacttccatcctgcattggcgcggggaagagtaacggctgttttcgcggcgttcttcgcggatcgccgttaaccgctcagggttaatggtcaacccaaataacttatgttgaaacggttttagcgcggcgggtagctgcaaattatccatatcatcggcggtaaacggatagttggccgcgcggataccaaattgcatcgccagatacaggctggtgggggttttaccacagcgggatacgccgagcaggatcacctgtgcctgatcgagattgcgcagcgatatcccatcatcatgggccagtgtgtattcaatggccgcgatccgggcgtcatacttacccaggttgttttcggtgagcccgtgggtgcgattaggcaccggcgttggatccaccgctaattcaccctgtagcgggccgaccagggcttgcacgatatcctggcagaacccttcactttgggtgatcacctggcgcacttccggcgagataatcgaatagaacaccagtggacgcaccccggtctgctggtaaatatcattgatctgttggcatacgccccgcgcacgcgcttcggtttccacaaaaggtagagtgaaagtggtggccttgacgggaaactgtgacagcaccgcatgccccaagacttcggcggtaatggccgtgccatccgagatataaaaaacgcttctttccacccataactccttaatgcctgaaacgactgatagcaacatcatggtctgcatatccatatatggtaaagagggggatagaaattttgtgacgctgggaataatttgcggaaatttgatttttttagtaaaacataatttcattttttataaaatggcgagtgctattttaactacctacctcgacgcaagttggcgctattttcgtcaaaaaaatcactaaaagtacgggtatttaagaaaaagtttaaataatacataatttgttgaattgtaagcttttagccagttagggaacgatccctaataaaattgtgcctgctggaattctgttaattgctattttcttcattggcttgatcgattcacctgtccattgtctatggatcattgtgctagtgtgggtgggtgccgttttttgcggtacgagtcaaaaatccgtcaataccctactgatagcaataaggattgtctcgatgtctaacaatggcccagacttgcgtaatgtgctttggtacaaccagcttggcatgcacgacgttgaccgtgtcggcggcaaaaatgcctccctcggtgaaatgatcaccaatctctccgatttgggcgtggccgtacccaacggttttgccaccaccgcccaggcatttaacgattttcttgagcaaagtggggttaaccagcgcatttatcagctgctggatcagactgacgttgacgatattgctcaactgtccaaggccggtgcgcaaattcgccaatgggtgatcgatacgcctttccacgcggaatttgagcgtgaaattacgctggcgtaccagcaactgtccgagggtgaaagcgaagcctccttcgccgtgcgttcttccgccacggctgaagatatgccagacgcctcgtttgccggccagcaggaaaccttcctcaacgtgcagggcattgatgcggtgatggtggcgatcaaacacgtcttcgcctccctgtttaacgaccgggccatctcttatcgtgtgcatcagggttacgatcaccgtggcgtggcgctttccgccggtgtacagcgcatggtgcgctccgacctggcttcctctggggtcatgtttaccatcgataccgagtccggctttgatcaggtggtgtttattacctcggcgttcggcctgggggaaatggtggtgcaaggggcggtcaacccggatgagttttatgtccataaaccgacgctgctgaagggcaatccggccattgtgcgccgcaaccttggctcgaaaaaaatccgcatggtgtacgcaccttcacaggatcacggcaagcaggtacgtatcgaagatgtaccagaagagcaacgcaatcgtttctctttgaccgatgatgaagtccaggcactggcgcatcaggcgttgctgatcgaaaaacactatggccgcccgatggatatcgagtgggccaaagacggccataccggcaagctgctgatagtccaggcgcggccagaaaccgtgcgttccaatgagcaggtgatggaacgctaccaactgaacggtaacagcaccgtgctggtggaaggccgagccataggtcatcgcattggggccggcccggtgaaggtcatccacaatatcagcgaaatggatcgcattgaaccgggtgacgtgttggtcaccgatatgaccgacccggattgggaaccgatcatgaagaaggcggctgcgatcgtaaccaaccgtggcgggcgtacctgccatgcggcgatcattgcccgtgaactggggatccctgccgttgtaggttgtggccacgcaacggatctgctgaaagaagggcagaaagtcaccgtctcctgtgccgaaggcgacaccggctttgtctacagcgacatgctggaattcagcgtgcaaagctcggaagtcactgaactgccagagctcccgttgaagatcatgatgaacgtcggcaacccagaccgcgcgttcgacttcgctcgcttgccaaatgaaggtgtggggctggcccggttggagtttattatcaaccgcatgatcggcgtacacccgcgtgccctgttggagttcgatcagcaacccccagagctgcaggcagaaatcaagacgctgatgttgggctatgacgatccggtcgagttctatgtcggtcgcttgaccgaagggatcgcgacgctgggtgcggcattctggccgaagcgcgtcatcgtgcgcctttccgatttcaaatctaacgaatacgccaacctggtcggcggcgagaaatatgagccgcacgaagaaaacccgatgttaggattccgtggcgcgggtcgttacgtggcggacagcttccgcgactgcttcgccatggaatgtgccgcgatgaagcgggtacgtaatgaaatgggcttgaccaacgttgaggtgatggtgccgtttgtgcgtaccgtggctcaggcggaggccgtggtggcagagttggggcgtcaggggctgaagcgcggcgaaaacgggctgaaagtgatcatgatgtgtgagatcccgtccaacgccttgctggccgatcagttccttgagcactttgatggcttctctatcggctccaacgatatgacgcagctcacgctggggctggatcgcgattccggtgtggtttcagaactgtttgacgaacgcaacgaggcggtcaaggcgctgctttccatggcgatccaggcggccaagcgtcacggcaaatatgtcggcatctgtgggcaaggcccgtcagaccatgcagactttgccgagtggctgatggatcaggggattgatagcctgtcgcttaacccggataccgtggtgcagacctgggttaatttgtcacaaagaaagtaaacctgaataacaacgtctattgaaaacataaaaccgccggttaatcctggcggtttttttatatgagcgggttattttgcataaaaaaaagcccatcaaaagacgggcaaagactacacacagcaattcagtgattcggggttaccttgttagctgacttgactggaaaacaatgtttgtaaaacaatgattttcagcaagatagagtttcatactaggtatttatctggcgcgcgtcattaagaatcgtcccaataaaacaggcgggattatatgggtccaatgcaataacaggcatttgaatggcaagcaggtaagtcagtagagaaattatcggagaggatgcggagtggaaagggaatatcggagtcatctcctgcccagtggatgggcaggagatgcaggatcacagctgttctaaatctttggcgacttcttccagatcggtagtgggttccggggcttcgtttacccaggcgctaagcaaccgataagagaccgccagcacgactgggccgataaacaggccaatcatcccgaaggccagcaggccaccgataacgcctgacaagatcagaatcaacggcaggtcggcacccatgcggattagcgccgggcgcaggaagttatccaaagttccgaccacacagctccacaccaatagcacggtcccccaggtggtatcaccggtccaatacaaccagataatagccgggatcagcaccagcaatggtcccagttgggccacgcagaaaacgaacatcagtacgctaagcagggtggcggcaggaatccccgcaacggccaagccaatgccacccaatatggattgcaccaacgccgtaaccaccacgcccaacgctaccgcacggatcgcttgcccggccagtaacacggccgcatcgcccctgttggaagcaaggcgcacggcaaaatggcggatcgccataccgacctgctcaccgcgggcatacagcaaggcgctgaacagtaacatcagcgtacagtgcatcaggaaacggccaatatgcgccgcctgagcaacaaaccaggtagcagtttggccgaagtaaggctgtattttggctatcaaggcgttgccaccggtgttcaccagcaggtgatagctgctataaagtttttgcccaattagcggggtagagcgtagccattccaattgtggcgcgtggatttggcccggtgcgttgacccaagccacgactggcgcactgttatccaccacgctactaaccagcagggcaataggtagtacgaacagcaagagcagcaggatggtcatcaccaacacggccagagaccgccggccccacagcaaatgctgtagcttaatcaacactggccaggtggcgatcaccaccatggatgcccaggcaaagcccaaaataaacggttgaacgacccaaaagctggcaacgatcaaaatggcgataaacagcacgccaaaaattatcgtcggtaaatcgtagcggcgttgcggttgtgtcatgaatgcgttttcatcctagtgagttaattccttggtacccttttatcatggagcatttttggcaactttcacagctaagcgcacattttcctgcgaattttggtctggggtacagactttcattgattagtgggattaataagttatgtgggggaacagatttgcggctaaatagctgttccaaatag

SEQ ID NO: 337 - DNA, 19356 bp, unknown
  Altogen  635822 strain
gacataagggttggggtgaggggtcactaaataacttacggagctcatccatgttggcattacgacaggttcaccatatagcggtgattggttctgattacgccgccagtaagcacttttactgcgatatcctggggttcaccctgttagcggaatattaccgcgaagagcgtgactcctggaaagccgatctggcgctgaacggccaatacgtcattgaactgttctccttcccatcccctccagccagaccaagccacccggaagcttgtggcctgcgtcacctggcattcagcgtagaggatatccaggcatcgattgcgcatttacaggccgctggagtcatttgcgagccggttcgggtcgatccctatacccaatcccgctttacctttttcagcgatcctgacggattaccgctcgaattatatgaactatgaatgcttaatctgctgagaacggcccaagttatgggccgttatgctatcatcgcgcccttgccctcagtgtccacagagttatttccgccatgcaagagcctgttttccgcgtcggggagtggctgatcaccccggccgacaaccgcataagccgtgatgggcgtcaacggacgctggaaccgcgcctgatcgatatgttgcagtacttcgctcagcacccggacgtggtgctcagccgcgacgagctgattgataacatctggaagcgcaatatcgtcaccaaccatgtggtgacccagtgtatttcggaactgcgcaaatatctgaaagacggcgatccagacagccccgaatacatcatcaccgtccctaaacgcggttataaactgacggcaccggtcatgtggtgtgaggaaggggaagacgcgccgccgttggtaccccaggtggccgtggtgatgcatgagccagaagatggcagcgaggaagaggcttccgcctatgtcccgccgcgtccggctaccaagccaaagaccctgttacccactgcggcaggtcgtttttatcaacgctcacccttttgggtctggctgactttcctggcggcgctgtctgcctgcgtcgcctttgtcggtattgcgaccctgtctcagcgcatacctgtgtccaccatgccggtgttgctcaacccgcgtgatatcgatattcgtatccagggtggtaacagctgcagcaactggacgccacagctctcttatgtggttggcgtgagtgaactggtcaccgacgcactgaatacctattccacgttcctggtgcacgatcagaccaactacaactttgccgggccgagcagctccggcaagtcgctgtatatcgagttcgtcaatcaacgccattaccgtgcccagcaatgcttcctgtcggtgcggctggtggataatgccgacagctcgatcatgctggataagcgctactttattaccactgataatcagctaaaaattcagcaggatttccttaccagcctgtcggcggcgttgaaacagccttggccgcagcaactggcacagcgtttggcgctgctgctgccgcaaaatggcccggcgctgcagcgtttctatcaggcacatcaattgctggtacagggagatgcggactcactgacccgcgccagcagccaattggaggcgataatcaaagcctcgccggattttgagtatgccgttgccgaaaaagcgctggtggatttgctgcgtaattcctaccaacctcttgatgaggccgagctggcacagctacgaacggaaattacccgcctggaggcgttgccgatattggctgattcccccatcttgcagcagatagtgaccgtcgatgcgctttcccaagggaaaacggatgaggcttaccgcgccattaataaagctatcgatctacagatgtcatggttgaactatgtattactaggcaaagtctacgaaatgcagggccataaccatcaggctgcggattcttatattactgccttcaaccttcgccccggtgaaaatacgctgcattggatccgtaatggtgtattccagacctcagtcaccgcagttgttccttatttagacaactacgacacacaaaaataactccattgccaaccgttggcacaaatacagcgacactataagccaaggcaggtgggagccatacggttacgaccgttgagcgcaaggatgcgcgattcaagcccccaggaatgggtttacggcgcgtcggttttctgcatgactcccatcggcttccctcttgactaccgccacttcgtgccagtatcctgttgtttataaacaatgtttatcttttctttagctcatgctgccaccttgatattttcaccataaacctcaagttgtcatttgtaggatcatgagcgtaatttcaccttatctttaggactttattttggcctatcgttagcatcctgattatcaagtctgttcattaatctcgcttcttaatgctcagcacttatcagcatcgataatcaggagaaactgaccatggcttcatccaagaaaatagggcttattgcctgcaccggcgtcgtcgccggtaatatgatggggagcgggattgccttattaccggcaaacctggcaagtctggggtctatcgccatctggggatgggtgatttctatcgtcggcgcgatgtcattggcttatgtttacgcccgcctggcgactaaaaacccacagcaaggcgggccaattgcctatgcgggggaaatctccccggcgtttggtttccagactggcgtgctttactaccatgccaactggatcggtaacctggcaatcggtattaccgccgtttcttatctttcgactttcttccccgcgttgaataatccagttccggccgggattgcctgtatcgccatcgtctggatattcacctttgtcaatctgctggggggtacctgggtcagccgcttgaccacgctgggtctggtactggtcttgatcccgatagtgatcaccgccgtggccggttggcactggtttgatgttgcaacctatcaagccaactggaatacctccggtaccaccgacagccatgcagtggtgaaaagtatcctgctctgcctgtgggcgtttatcggcgttgaatccgccgccgtcagcaccgggatggtgaaaaatcccaaacgcaccgtaccactggcgaccatgctcggtactggcctggcagggattatctatattgccgccactcaggtgatgagcgggatgttccctgcagcgcaaatggctgccagtggtgctcccttcgccatcagcgcctccgccattatgggcaactgggcagctccgatggtatccgctttcaccgcctttgcctgcctgacctcgttgggttcctggatgatgctggtaggtcaggccggggtgcgtgcagccaacgacggcaacttcccgaaagtgtatggcgaactggataaaaacggcattccgaagaagggcctgctgttggcaagctgcaaaatgaccgcgctgatggtgttgatcaccgtaatgaactccagcggtggcaaagcttccgacctgttcggcgaactgaccggtatcgcggtgctgctgaccatgctgccttacttctactcctgcgttgacctgatccgctttgaaggtgtcaacgtgcgtaacctgctgagcctggtggcgtcggtactgggctgtgggttctgctttatcgccctgatgggcgccaactccttcgagctgtccggcacctttatcgtcagcctgatcatcctgatgttctatgcccgcaaaatgaatacccgccaggttgccaaagcagccgctgcggtcaacgacagcgccacggccaaagcgcactgagattgcgtgctctgacccactgaatttacccagcccctttctttccgacctgtcagccgcgacgggaaggggcccgctttgcctggagaaatgattatgaacgttattgccatcatgaatcacatgggtgtctacttcaaagaagagccgatccgcgaactgcatcaggcgctggaaagcctggacttccgcatcgtctaccctaatgaccgtgaagatttattaaagctgatcgaaaacaatgcccgcctgtgcggcgtgatttttgactgggacaaatacaaccttgagctgtgcgaagagatcagccagctcaatgaatacatgccgctgtatgccttcgccaacacttattcgacgctcgatgtcagcctcaacgatctgcgtatgcaggtgcgtttcttcgaatatgcgctgggtgcggcaaaagatatcgccgccaagatcaaacagaacaccgacgagtatatcgatgccatcctgccgccgctgaccaaggcgctgttcaaatacgtgcgtgaaggcaaatatactttctgtactccaggccatatgggcggcactgccttccagaaaagcccggtaggcagcctgttttatgacttcttcggcccgaataccatgaagtctgacatctccatttcggtttccgaactgggttcgctgttggatcactccggcccgcacaaagaggctgaagagtacatttcccgcgtgttcaatgccgaacgcagctacatggtgaccaacggcacctccaccgccaacaagattgtcggcatgtatgccgctccggccggcagcaccgtgctgatcgaccgtaactgccacaaatcattgacccatctgatgatgatgagtgacatcacgccgatttacttccggccaacccgtaatgcctacggtattctcggtggcatcccgcagagtgaattcagccgtgccaccatcgccaaacgggtgaaagaaacgccgaacgccagttggccagcgcacgcggtgatcaccaactccacctacgacggcttgctgtacaacaccgatttcatcaaacagactctggatgttaaatcgatccacttcgattctgcctgggtgccttacaccaacttccatccgatctataaaggcaaatgcggcatgagcggcggccgggttgaaggcaaggtgatctatgaaacccagtcgacccacaaactactggcggcgttctcgcaggcttcgatgatccacgttaagggtgacatcaacgaagagacctttaacgaagcctatatgatgcacaccaccacctcgccgcattatggcatcgtggcgtccaccgaaaccgccgctgcgatgatgaagggcaacgctggtaagcgcatgattaacggttccatcgagcgtgccataaaattccgtaaggaaatcaaacggctgaaagtggagtccgaaggctggttctttgacgtctggcagccggagcatatcgatgagccagaatgctggccgctgcgttccgacagcgcctggcacggcttcaaaaacatcgataacgaacacatgtatctcgacccgatcaaggtgaccatcctcaccccagggatgagcaaagaaggtgagatgcagccgttcggtatcccggccagcctggtagccaaatacctggatgagcgcggcatcatcgtggagaaaaccggcccgtacaacctgctgttcctgttcagcattggtatcgataaaaccaaggcgttgagtctgctgcgcgcgatgaccgatttcaaacgctcgttcgatttgaacctgcgggtgaaaaacatgctgccatcgctgtatcaggaagcgcctgagttctatgaaaacatgcgcatccaggatctggcgcagaacatccatcgcctggtcgagcatcacaacctgccggacctgatgtaccgtgcgtttgaagtgctgccaaccatggtgatgaacccttaccacgccttccagaaagagctgcacggcgaagtggaggaagtctatctggaggatatggtcggcaaggtcaatgccaatatgatcctgccttatcctccaggcgtgccgttggtgatgccgggtgaaatgctgaccgaagaaagccgcccggtgctcgagttcctgcaaatgctgtgtgaaatcggcgcgcattatccgggctttgagaccgatattcacggggcttaccgccagccggatggtcgctacacggtgaaagtgttgaaagcggaataatggcatcacaggggaaagcacagacgctttcccctttgttatcctgatgggagtacaccatgaaaacaccctcacagccgcgcgctatctactacgtcgttgcgatacaaatctgggagtattttagtttttacggcatgcgcgcgttactgatcctctacctgacccaccagttaggctattccgatagccacgccatcacccttttcagcgcttatgcctctttggtttatgtcacccccattctgggcggcttgctggccgatcgcctgttgggcaaccgcgtctcggtgattgctggggcggccttgatgaccttgggccatatcgtattggggctgggagcggtctcggccaactccctttacctggcgctgggcatcatcatctgcggctacggcctgtttaaatccaatatcagctgcctgctgggagagctgtaccaggcgcaggacccacggcgggaaggcgggttttctctgctgtatgccgcggggaacgttggctccatcctggctccgatcgcctgtgggttagccgctgaacgctatggttggcacgtcggctttgcactggcgggaatagggatgtttgccgggctgatgatcttcctgtcggggagcaaacactttcggcatacgcgcggggtgaatatcccgctgatacaggccaccacgttacgcttgccgcattggttctggctggtggcaggggggctgtgtgctccgctgtttttcgcgctgttgttcattcacaactgggccgggtatctgcttggcgtggtgtgcgccgctgcggtggtgatcgtcatgcgtatcctctggcgggtgagcggtgagcaacggcgagcgttatggcaaatcatcatcttgatgctgctgggaacgctgttttgggcctttgcccaacagggcggcagttcgatcagcctgtttatcgatcactttgttgaccggcaatggttctcttggtcggtgcctacggcgctgttccagtcggtaaacgcctttgcggtcatgctcggcggcgtgctgctggcttgcctgatgcgtaacagccagggaaacgctcagaccgtgcgcatctggtgcaagtttgcctttggcctgctgttgattgctgtgggctttatgctgatggcattaaatgcgcgctggggggaactgcatggccaggcctcgatggggatgatggtggcagggctggcggtgatgggatttgccgaactgtttatcgatccggtagcgatggctcaaatcacccggttggatattcctggtgtcactggcgtgctgaccggtatttatatgctggcgacgggctcggtggctaattacctcgcgggcctgattgccaaccagaccaccgaaagccagttgggtaatgcgatgattgaagcttacggcaaggttttcacccagattggctggggagcagcaggcagtgcggccttggtgttggtggctctggtgctgtggtggggaatgacccgtcgcaatgatagcgcggttaatgcttgattgatggcggtgggctggttaacgtgcagttatgtagatgtcactaagctcaattgatgaagacccaccacctcctgacacagattgccgaccatctaggggctgagcgccaactgctgctggcgttcagcggcggtctggattccagcgtactgctgcacctgctggtgctgttgcgccagcagcaaccggacatcgctctgcgcgcggtgcatgtgcaccatggcctgagccgttttgccgatgattgggtggcacattgccagcagcaatgtgaacgctggcaggtcccgctggtggtaaaacatgttcagctagaggggcggcctggggggatcgaggccgcggcccgttcggcccgctacgctgttttcgcagaaacgttgaccgcagacgagactttgctgacggcgcagcatcttgacgatcaatgtgaaaccttcttgctggccttaaaacggggcagcggccctgcgggactgtctgccatggccgcacaaacccgcttgggtaacaatcccttattgcgcccgctgttgggaatatcgcgccagcagttggaagcctacgcacaccagcatcaactgcagtggatcgaggatgacagcaatcaggatccccgcttcgatcgcaacttcttacgtctgaacgttttgccgatagtgaatcaacgttggccgcattttgctgccgccaccgcacgcagcgctgaattatgtgccgagcaggagcaactgcttgatgagctgctggctgagcaattaacccaactgctggatggcgaaaactcgctcgctatcgccgaattggctacctgctctgctgccaggcgctatgctttgctacggcgctggattgggctgtttggcgtcaccatgccagcgcgagatggtttgcatcggctatggcagggagggggattaagccggggagatgccgaaccgcagctgcaactcgggaactaccagatccgccgttttcgccagcgcctgtacctgctaccgctgatggctgatctgagcggcacacgattgccctggcctaatgaggctccactggaattaccagacggactgggtactctgtacgtgggcgaaggtgaatgcctggtacgcggccctttagagcatgagtcggtcagtgtgcgctttaccgccaagggcagggcgcggattgttggccgtgccggttcacgtccgatcaaaaaactgtggcaagagttggctattccaccgtggcagcgtgaacgtatcccgttgctctattatgatgagcagttaatcgctgccgtgggcgtatttattactgaggaagggcaagcgtctgcggggcaaccggcctggcggcttggctggaaaaaaaataataacaatctgctgtgaggagtgggcaatgaaattggtgagcgtaatggtagtgatggccagcgtactgagtttttccgcgatggcggcgggcgatgcggtggcaggcaaggataaatcggccagctgcatggcctgccacggcgcggaaggcaaagtttcggttccgatgtacccgaatctggccgggcagaatcaaatgtatctggagcactctttgcaggcttacaagaaaggggagcgctctggcgggcaggcggaagtgatgaaggcctatgtctcaggtctgtcggatgaggatattgccgacctggcggcctattacgccagcctgaagccttaaatgacgagggcagcccttgggctgccctgtggagatggcgttaccgcaaagtcagtctgacaggctgacaaccacggtaccgatttccggatgactgaaactgaggatgtgatccagacgcaagctgagagcacttccggcctgatcgacaatcaggtactcaacgcccttggtaaatttcaactcggtggcaatgccttcgaacttctctccgtcgcgtaactctagcttcagaatgtagttatgctgacaggcgagttccaggctttcatagtcatcgcaattgatggattggtactcatcattcatcaacatggtcgctcaccaataagttagcggcggcaaatgccgcctgttccctaacggaggacggcagctcgctattcgcggcaacctcgtccaatgcctttaacacacatgctagtgcatccggcacgtagcctagatctccactgccgatctgagcgtaaaaacgtcgtactaactcacagtattgttgcacaatggcctccctttaggatctctgcattattgccacgcaggctgcaataaggcacagacactcggggttaaatcctatctaaaggactatagcacaggtgttagggagttattagttcctctttttgggcattagtccactcctgatgctccccgtgctggctgcgggctgccctgatcaagtacaatgtggcctgttaataatgaggttacccatggcgctgaaagcaacaatttataaagccacgctcaatatcgctgatatggatcgtcacttttactgtgataccacactcaccctggcccagcatccttcagaaaccgaacagcgcatgatgctgcgcctgctggcctggatctgccatgccgatgagcgcctggtgtttaccaagggactgagtgcggaagacgagccggaaatctggcggcgcaacgaccataacgggctggaaatgtggatagagctggggctgccggatgagaagcgcatcaaaaaggcctgcaatcagtcacctagggtggtgctttacgcctatggtgatcgtgccgggcatgtctggtggcagtctatgcagagcaaagtcgccaaccacaagaacctgagtattcgttttctcgatgatgaacaactgtcccgcttgaccgcgttagccagccgcaatatgacgctacaggccacgctgcaggaagggaccatctggctgtcagaccttcagaatagtctggaaattcaatttgccgaatggcagcaggcgcaggaataaccggtgctggaactgtcaagaaacgtagccataccggacaacgaaatagaattaacggcgatccgcgcgcagggtgcgggtggtcagcatgtgaataaaacctcaacggcgatccatttgcgctttgacatccgggcatccagcctgccagagtactataaagaacggctgttggcgcttaaccatcatttagtgaccggtgatggggtggtgattatcaaagcgcaggaatatcgcagccaggaaatgaatcgtgaagcggcactggcccggctggtggcgctgatccagcaggcgatggtggtcgaaaagacgcgtagggcaaccaaacccagtaaaggggccaaattacgccgtcttgaaggcaaggtgcgcaaaggtgccaccaaggcactgcgcggcaaggttcagccttagcctacgccgtggatatcaatggatgacaacaggagaataacttgaagcaaataactatcgccctgtttttagcggcaggagccctttcattgctgggatgtaacaatcaataccagccaaaagaacaagcgcttcagccgatgcagcagagctatcagggcttattgccttgtgcggactgctccgggctggacacatcgctgttcctcgatgaggacggcacctttgtgttgcaggaaacctatcgtggcgctaaagatggcgatcaaacctttgccagttacggcacatgggcgcgtacggcagataagctggtgctgaccgaaagcaacggtgaaaaacgttatttccacccggaaggcaagcaattgagaatgctggaccgcagtggagcaccgattgtctctcagcttaattatgtgctgtcgccggtgaccaaagccttgccgaaaacgccgatgccgttgaccgggttgtatacctatatggccgacgcggcggtatttaaggattgtgccactggcaaaaccttcccggtagcgaataatatcgcgctggagcagggctatctgaaggctcagcgggcgccgggcgaaccggtattcctgatgttgaacgggcatttcagcgtgcagccttccatggaagaagggcagatgcaaaaagcgctgatcccggaacccggtggcaagatcactttcgacagcagcaagagctgtgctaactgattcccctcaccctaaccctctcccacagggagagggagctgcccggagttcttgatgagttcgtgcggcttcggaatgtagggagtaggaacaaaaagataaggtattacgcagaataatcagcgaactcgatcggttccctctccctctcgattagttcgtgcgactttggaatgtggagagtaggaacaaaaagttaaggtattacgcagaataatcagcgaactcgatcggttccctctccctgtgggagagggttagggtgaggggcctgattttttgccaacgcccgcgagcgtaaatagatccccggcttgatatggccaacgtaaaccagcgctttgctaggtgccagcgtggcaatatccccttcccgcatatgcagtaaatcgcccggactgacccagcctggggcggccaatgtcaacggatgccccgcgttttcaaacgcggcaatcacaaactccgaacagaaatacgacgactcggcaccggtcggcgccttgagctgggctgcggccaggcctttgacacattgctggcggaaatcggcagagaaggggttcagcgaacacagctgcttggtcatcataaagggcaccatctcggcaatacccagatagttataccggctgccggctttttggctggcgaattggcggatttggctagcctgctccggtgtcagatcggggatgcgcaaagcaaacatcttgtcgctatgggtcagcgcatctttcaggctgataatctgcacgccttcccctaccgcttcggcaacctggccttcgccaatatacacggccacatggctgactgacgaagtactcaagatacggatcccgagtgatttcaaaccgatagttgaggagaacagcaggtcaccctcttgcagatcggcctgattgatttcgcgcagagtttttccaggggcggagcttaacgattggaactgaacgttgacgggattgatggagtgtttttcacggtcggataagcctacgtccatggtacaaccggtcaaaaaaactgaaagcaaagcaaacaggcgggtagccggggggctgcgtaatggcataagttaatcctttaacaacaacatccatcaataaagccccccatctggggggctttgtctagcgattagcgttggatctggcccagcaggaaatcaacgatttcgccggttttgatcatctgcttctcgccaacacggcgatttttatactcaatttcttcgctgtcgaggttacgatcgccgatcacgatggagtgaggtacgccgatcagttccatatcggcaaacatcacgcctgggcgctctttacgatcgtccaggatcacgtcgatgccatgtgaacgcagggtatcgtacaattcttcagccagtgcctgcacgcggaatgacttgtgcatgttcattggcagaatcgctacctggaacggggcaattgcgtccggccagataatgccacggtcatcgtgattctgttcgatggcggcagccaccacgcgcgtcacgccgatgccgtagcaacccatggtcagcacctgattacgaccatcttcaccctgaacggtggctttcatcgcttctgaatacttggtacccagctggaagatgtggcccacttcgataccgcgcttgatcagcagcgtacctttcccgtctgggctggcatcgccttccaccacgttacggatatcggcgctatgtggcagcggcagatcacgctcccagttgatgccaaagtagtgtttaccatcgatgttggcacccgcgccgaagtcgctcatagcggctacgctgcgatcgacaaccactgggatcggcaaattgactgggccaagggatcctgggcctgcgccgacgattgcacggatttcttcttccgtggcgaaagtcagtggaaccgcgacctgtggcagtttctcggccttgatttcattcagctcgtgatcgccgcgcaccagcagggcaaccagcttgtggccactctcttcacgggcgtgcaccatcaaggttttcaccgttttctctactggcagttggaattgctctaccagctcggcgatggttttggcgttcggcgtatcgacgatgcgcagttcttccgttgccgcagcacgtggctgtgcaggggcaaccgcttcggccagctcgatgttggcagcatagtcggaaccggttgagaacacgatatcgtcttcaccgctgtctgccagcacctggaactcatgcgaagcgctgccaccgatagaaccggtatcggccagcaccggacggaaatccagacccatgcggttgaagatcttgctgtaggcctcgtacatcgcgtcgtaggtgacctgcaaggattcctgggtggtatggaaggaataggcgtccttcatcaggaattcacgcgagcgcattacgccaaaacgtggacgaacctcgtcacggaacttggtctggatctggaagaaattcagcggcagctgcttgtaggagctgatttcgttgcggatcagatcggtgatcacttcttcatgggttggaccaagcacaaagggacgctcgccgcgatcgacaaagcgcagcaattccgggccatattgctcccagcggccgctttccagccagaggtcggcgggctgaacaaccggcatggaaacttcgatcgcgttagcattgttcatttcttcgcgaacgatgttttcaaccttcttcagaacgcgcaggccggtcggcaaccaggtataaagaccggaggccagcttgcggatcatcccggcgcgtagcatcagctggtggctgatcacttcggcgtcggcaggtgtctccttcagtgtggagagcagatattggcttgtacgcatggtgttttggttccgttagaactgcaaattgcatcgggctgccagggttggccgccaaaattttcaaaagtggcttagtttaccagcgcaagccggttgtcaaaagagagcgggcggaattttaacgggcgtcgagcgacaacacttcgctttgactatcaacgatccgccagcgcacgttgaactccaataaccataccgcatattcgcgcccgctggcttcttcttttcgataggcggggcgaggatcttgcgccagaacctgagtgataaaacggcgcaggttgggatagcgccgcacatgttgctgcagctgttgttccgcttcgggcgagaaatacaccggcatatcgccagcaggagccgcctgagcaaacccggctcgcgcttgcggatggctttcggcaaacggcaaatagggtttgatatcaaccaccggcgtaccgtcaaccaaatccaggctgctcagctccagtaccacctcgcccccttgagtccgaatgcctttcagctcgatcagggacatacccaacgggttagggcgaaaggtcgaacgggtggcgaacacacccatacgcgcattgccgcccagacgaggaggccgcacggtaggacgccagcctccttccatggtttgatgaaacacaaacatcacccacagatggctgaactcactgaggccacgtaccgcttcgggctgattgtaaggcggcagcaacagcagttcaccgccgccgtcttccactagccctggctgacggggaaccgcgaatttctctttatacggagaacggatggtgccgatctgctcaaaaacaaattcggtcatttggcagagacgttaagcgcagagccttggcagatggcctgctggtaacaaccggcgacgccgctgacaatctggcagtcatgcagtagcaccgcattggccttcatgtaggaagcccgggtctgcatacgcttacgtgcggtattcagatttggcggagagtcctgaaccgtggtctgacaggattcgccagaaacctcacctaaatcgcggaaaggcttgccgaccagctcttctgcactcttgtacagttttaccggggccgggcgggctgctggggtggcttttaccggagcgggagcggccgtagttgttgtgctgtttgttgtggatggagccgtgtgctgcgttgagcatccagtcagcgcgagcgctaacaaacagagaggtaaaacacgcattgagagtccctgccattttataatcaaagtggcgctattgaagcaatctctggcgcaaataacaagacgggccgtagcccgtcttgcaattatcggaataaaatggctaaggaacgattaccagccttttactgcgccaccgttaaagatcttgttggccgcttcgttaacttcgtcagactggtaagcctgaacgaatttcttcacgttttccgcgtctttgttatcttcacgggcaaccatgatgttgacgtaaggtgagtctttatcttcaacaaacagaccgtctttggccggcgtcaaaccaatctggctggcataagtggtgttgatgatggccagcgcgatttgctgatcgtccagtgaacgtggcagctgtggtgcttccagctcaaccagcttcaggtttttcgggttctcggtcacgtccagtacggttggcagcaggccaacaccgtctttcagcttgatcagaccctgtttttgcagcagcaacagtgaacggcccaggttggttggatcgttaggcagtgctacctgtgaaccttcttgcagctcatcaatggatttgatctttttggagtaaccggcgatcgggtacacaaaggtgttacctaccgtaaccagcttataaccacgatccttgatctgctgatccaggtaaggcttgtgctggaaggcgttgacatcgatatcgcctttgctcagggcttcgtttggcaacacgtagtcgttgaaggtgaccagctcaacgtccaggccatacttatcttttgccactttttgtgccacttcagccacttgctgttcagcaccaacaataacacccactttgatatggtttggatctttttcatcctggccacaaccggccagagccagagtaccgatcagtgcgccgattgttgcgatggatttaaattttaacgacatatcccttcctcaattagactcgcatatgaaatacgctttactctttatcctgccgggtgcagcaaagctatcgagtagatgtcagcgcgtgggtaaagctatttgtgggtaacggccttcacgatacggtcgccaccaaactggatcagatacaccagcaccaccagtaatattaataccgtattcatcacggtagcgttataaccaatataaccatactgataaccaatttgacctaagccaccggcaccgacggcaccgcccattgcagaatagcccaccagggtgatcagcgtgatggtagcggcattcaccaaacctggcagcgcttcaggcaacagcactttggtgatgatttgcataggagtcgcacccatggcacgagcggcttcaaccagacctgacggaatctccaatagggcgttttctaccatacgggcgataaagggagccgcgcctacggtcagtggaacgatagccgcctgcaaaccgatagaggtgccaacgatcatgcgagtgaacgggatcatccagaccagcaggataatgaacgggatggaacggaaaatgttcaccaacccggacaacaccttataaacggtattgttggcaatgatttgcccggggcgggtcacatataacagtacgccaaccggcaagccaagcacaaagccaaagaagccggagacaaaggtcatcgtaacggtttcccacacgccacgtgccattaaccacatcattgcctcagacataacccagaacctctacttttacctgattttcttgtaggaacttaatcgttgcctgtgcatcttgatcggagccgtgcagttcagccagcatcacgccgaacttcacgccgccagcgtaatccatctgtgcgctgataatattgttgttcacgttgaagcgacgggccgcttctgacagtaacggtgcatcaaccgagcggccggtaaactccaggcgtaacagcggctgacggccaccggtacgctcaggcaccaggcgcgcggcgtagtcgtccgggatatccagatgcagcgtagcttggataaactgctgtgccagcggcgtcttggggtgtgaaaacacttcgctcacgctgtctttctcaatcaactggccctggctgatcaccgcaacctgatcgcagatacgtttcactacgtccatttcatgggtgattagcagtatggtcagccccagacggcggttgatgtctttcagcagttcgagaatggagcgggtggtggctggatccagtgcactggtcgcttcgtcgcacagcaacaccttaggattgctggccagagcacgggcgatggccacacgctgcttttggccgcctgacagattggcggggtaggcatcgtgcttgtctgacagaccaaccagctccagcagctcgaccacgcgttttttgatttccgcgcgtggggtgttgtccagctccaacggcagggcaacgttaccgaagaccgtacgtgaagagagcaggttaaagtgttggaagatcatgccgatctggcggcgtgcgcgcgtcagctcaccttcagacagagaggtcagatcctggccatcaaccagaacggtacctgacgtcgggcgctcaagcatgttggcgcagcggatcagcgtactcttaccggcgccggaggcaccgatgacgccataaatctgtccggcaggaacgtgaagagtcacgtcggtgagtgcgctaatggaacgcgacccctgctggaacactttggtgatgttggaaagtttaatcatattcttcttatttttagcttggttgccgtggcctaataaagagagaccttggtcagcgccaaggtctggatcagatgttaaggcgtctagacgtccaagtcaacgttaacgctattcttcatcattctcagtctcggcgaaaacatgcgatactggggcggttttcaggctttcaggagcataccggtgacacaacgcgttccagcaattttcttagatcgtgatggcacgattaatatcgatcatggctacgtccatgaaatagatgatttccagtttatcgatggcgtgattgacgcctgtcgtgaactgaaaaacatgggcttcgcgctggtgctggtcaccaaccagtctggcattgcccgcggcaaattcagcgaagaccagtttatgcgtctgacagaatggatggactggtcgatggccgaccgcgatgtcgatctggacggcatctatttctgcccacatcatcctgaagcagtaatagaagagtatcgccaggtttgtgattgccgcaaaccgcagccgggcatgttgctacaggcgcagaaagaactgaatatcgatttggccgcttcttatatggttggcgacaaaatcgaggatatgcaggcggcagcagcggcaggggtcggcactaaagtgttggtacgcaccggaaagccagtaactgaagaaggtgagaaagcggcggattgggtgctaaacagcctgcaagagctgcctgcagcgattaaaaagcgggtttaagcagcgttatgcatgaatagtgagcggtcggaagaaaagtgcatattaacccttgtcattctgaaccagctccctataatgcgcctccatcg

SEQ ID NO: 338 - DNA, 24427 bp, unknown
  Altogen  635822 strain
  misc_feature (24399)..(24399): n is a, c, g, or t
gagggctagggtgaggggcatcactcggcgataaagcgctcaagacgatgacgtagctgagcgttctccctgcgcaactgttcaatctcatcgagcaacgtcagcgctaccgcgatgccgggccaatccaaagccagttcacgttgcagacgctgggcacgattaaacgccgccaccgccccatcatcaaacagccaatcatccaccgtcagatcgcggggctggatcactcccaaccccaccacctcggccagttcactttccgttacgccggtatgcaggcaaaactcggtaatggtgagggttatctgtagcttggccattatgctttactccattgcgtacgaggatcgaaggcctgattcgcctcggccagtcgttgccagagtgcggcgctgtctgcatcgggtttggccggcatgacaatcttgatcaccgcatacaaattgccggtctcttttttgctgaccagccccttccctttgacccgtagccgttgcccggtctggctccccgcagggatggtcaacaggatattgtccgccagcgtggggacagaaaccttggtgcctaacgctgcctcccaaggagccaagggcagaacgatttccagatcgtgcccgatcacctcaaacaacggatgcggtgccagttgaatgatcaggtacaaatccccattggctccgccagccatacccggcacaccttggcctttcacgcggatacgctccccgtctgccacgcccgccgggattttcacgttcagcgttttagcgatctctttctctgtctgaccaaatgcgttgtacaccggcaccttatagctcagggtgcgagtttgctcagtgagggtttcctccaggaacagcgccacgccgatctcaacatcctgcccacgggccgcacgcggctgcccacgtgcacgctggccaaacatcgaggagaagatgtcggagaaatcctcggcaccaccatactcttcatgccgggtctggcggccaaagttaggctcattacgatgcagccgcatttggtcatattccgcgcggcgttcgctgtctttcagcacttcataggcttctgcgacttctttgaagcgcgtttcggcatcgggctcggtactgacatcggggtgatatttacgtgccaggcggcggtaggcagttttgatagccttgatatcatctgagggtttaacctctagaatggcgtagtaatccttgatttccataatgctatggtctctttactgtggccggaaaagtggatagcgcgttgatacgtgagcaagttgaggagataaggctcattgtagcgccatcaagcagttagtgcagtatgcgcatcacttcacgcggtgatttagcgtttcgggctgatttgttgcggaacgtgcgggaattaccgtgctgacacagtgttgatgactcggcccatatctgagccggtcaccaggttgtgagtgaatttcgagttaacattgcaggttccggttgctagccagtttcacggttcttcacctcccacgccttgcgtgttattgaccatcatcactggcattgccagaaaagcggcgacgcccacgatcacaaaaagagtaataatcactgtcattaacatgcgatcaccccatcaacgtggcgttgttacggctgactctctgttttggttaattacattgctggcctggactacttggcatttgcggtagcgggcaagttcagattagctggtttttccgaatgctggcaagccctgtattgaggcttttttctgctggatgttgggtcggcccgccgttcagcggtggcgcggctggaccgacctcagtttattgcatcagaaccaggggaattggcccatgacgctatgataaaacagcatacgcccgacaatttcccccgacaccattgccgccccggctatcacggccatcgatggggtcaaacgcaggcgcaggctcagcaccgcgaacagcacaccacccaccaacatgctgccaaccagttgccaccaaagcatgatcccttgagcgctggccccggcaatctggtaacggcccatcagcgtcgccagcagcaacagacaaccagccagcaggccatagcgaaccgttcgcgtaacgggcaaaccgcagcaactcaaatagatccccaaggtggcgaatcccaatagtaacgcggtactcagaaacgccaattgggtcagtggcgtatgccacagcggatggctggccatttggtagtagatttgcgccgagaccagaatggcggcaatccccactaccgatgtgacgagccctaatgcggtcatccaagccgacttttgcggccgcagccagcaagttgccaatagcaggaacaggctgatattcaccaggataaaggcgatcacctctcggcttaaccaggagtgcggcaggcccagcaccgcgcgataggccccaaacgggctccccaggtgcagcagtgacaaactggagccaactacctccaccagccacaatcccagaaccagatatttcagttgcttaacggacatctgggatgttggtcgcaaccgatagagcgtcaaagcgataataccgccaatgccccattggcaaagcacggtaaaaaacaccaacggcagttcatattcgttcatggcagcacctttttatttgtccgctggaataatgaccacgttcgggccgctgatgcgatggtcaggcaaatgatatctagcctccagtaccgcccaatccgttgaatggattttccttaactcctcgatatcaccaaacttcaagactcccgccgggcaagacgccacgcaacgcggcggtaatccttcatccaaacgctcggcacacatattgcacttactggttttaccttcctgcgggtcgaagaccggggcgttatacggacaagccataatgcacatgcggcagccaatgcatttctcgtgatcctgcaccacaatgccgtccgggcgcttatggtaggtatccgccgggcaaaccttcatgcattgcggatcgtcacaatggttgcaggacatcgaaataaacccttccgagttcgggccatcggtttcatactcccgcacacgccgccaaagcacgccgggtggcgtctgattctctgacttacaggccatggaacaggttttacagccgtaacaacgcttaatatcaatcagaaagccatattgtttggtcatgggttatccctccgcccgtacatcaaccagtgtactgttacagcaatgcccggtacccaacgcctctacggcgtcattggtgacgtggctgctgctgcctccctgctgttcccaccagccgttatccagagaaactacgcctcgtttgatatgcgtcgtcactacagcaatcgcacgatgctctccccgctggttaaatacggtggcccagtcgccgtgtttgatccggcgctgttgtgcatcctgcggatggatcatcacgttaggcttattgcgctgcacctcaaggatccattcgttcatgccgtggcttgagtgaatgctgcgggccagcttgcgttgtaccgccatcagcgggtacttggcggccaattccggcgaaccttgcggcgattcattcactcgcaggtaagtgacgaccggcgagaacgccttcttctgccactcttcaataaagaagtgggctttacgagtcggtgtgcggaacaccccattttcaaatgggatccagtcgccgctcaccggtagcaccggcccttttttcagctgttccagggtgataccggaaccttgcaggcacgcattgatgtaatgctcaattggctgattaaacacgtcgccaaagccaaagcgttccgccagacgcgcaaagatccaataatccggcttggcttcacccggtggctcgaccgcttgctccatcagttgcacatagtggctacgcacacccgccatcaggctgacatcttcaaaaatggtcgtcaccggcagcaccaggtcggcatacagcgcggtagagctcatcaggttatcggccaccaccacgaaggggaccttttccaacgcctttctgaccatatttgtgttaggcaactgggtcatgagccccatggtcataatccaccagaatttgatcgggtaaggccggtcattggccacccactcgcctaccttggaaaccggtatcggggtgattttcttcaccgcaggcgcgggtggaatgatcggaccgaacttcgccatttggcgtgctccgcccgcatcacagatccctgctccccgtttgccgatattgccggtgagcaaggccaggtagaattggctggcggccacgtaggtaccaaattcggtgcgctgagcgcccgacatattttgcacaatcatcgccggagcggtggtggcatagtcgcgggccaaacgcaaaatagtgtgggcgggaatgtcggtttcagccgcaacccgatcgagggtccatggcgcagcctgctggtacacggtttcgaacacggtacggtagccgctgtcggttggcagttgatgctggaacagcgccggggtgatacccgcctggtcatgccgcgccaggctttggctggtgcagtcataaaccagatagctttcactgtcggtggcatcggcccgcactaattgatctttggcatccaccagatacaccgcgccggtatgctggcgcaggaaatccgcgtcaatatgctgctcttcgataatgatcttcatcatcccgagcgccaacgccgtatcggtgcccggcacaatcgggatccattcgtccgctttggcggccgtttcgttgaaacgtgggtcgataaccacgatgcgtgcgccctgctcttgtgcacgcagatagtttttaaaataggcctgcatggttaccgctgggttgttaccccagcagatgatcaaacggctgtcggcaatggtgtcacgggtatcggcatagcgtagccccaccattggcatcatcgccgccgtcacagccgagcagcagagcgatccggcctgtttcacagaaccgcccagatagtcgaagaacgccttgcccatatcgttctttatcgagtccatgttgccagcatgggtggacagcagcagcccttcgttgccctgttccttgatggtggtacggatgttcttttcgattaaatccagtgcctgttgccaggtaataggctcgaatttgccctcacctttcttgcctacccgcagcaaaggcgtcgtgacgcgctgctggtgataaacccatttggtacggctgatgccccgcaggcaacatttcacattaaagccttccgtcgcttcaatcttcatcagctttttctgatagacgtaagcggtcaggttacagtgcaggcactccatcgcacaggttgagcgaaaggtttgataatccgtcagttttagatggatacggcgtaagggttcttgttgttcggatgttaaggagaaagcgcaaggggatattgacgccagaccaataacgcccagcccttttagcaaagtacgccgtttgagtcggagtgaagaaagttcgttcatagtttttatctcggtaattacacgccctggtgttcactataaataaaccgagttaaccaatggtatattgaagcagatcaatccacctcaaaatagttagtccttacgcgctgaaaatgctcccgctgaggatgccaggatctggttaactggggcattcaccgccttaaactggtaaagtgatcggatcgaggtaatagcaagtaaggtaagcagaatgtcggaagttcaaggcgtaaattcggtcgatattgccgtgtcggtcttagagagtgtcaccgcattggggggaaacgcccgcgcttcggatattgccaaacacagtgggctttcgaaaagccggctgcataaatatctggtttcgctgtgccgtagccagatgctgtatcaggagcaggaaaccagccgctactcgcttggcagcaagctgttggcgctggccgcggcggcaggcaaacagcagacgctggcgacaatcatcaataatgcgctatgtgagctgcgcgatgagttgaactactccaccggctgggcggtgcgccaagggggtaacatcttgctgacgcgctacaatcgcagccataaaaatattgatatcgattaccttgaaaacaccctcatccccatgaatgccagtgcggcaggctatgcctatcaggcgtttgatggctccattacgccactgctcgaggctaaagagctcgaaaagatccgtcagcagggctatgcggtacgttacaatgttaccgaaggcatccctggggcacgagcgatagcctgcccgattttcagccaggataacgttctgttggggatggcgatcaccatggggtttattccagacgatccgacagagattgtccgtctggcagaccacctgatggcgaaggtcaaaacgatcccgctttaaccggcacgaaggtgacaacccggggcctgtaaggtacgctaagtgagcctgccgtaagctctgcgctgcggttaaacgacaaaatcaattgggtaaagttattgatacaagaacatcacctcgcactagtctgcgcactcagtaaatgggtcgaaacccacttgggacgagtgatccaccttgaagagctggccgagtattccggctattcactgtggcatatgcagaagctgttcaaagaagcgacggggatctcgctgggcaagtacattcgcgagcgccgccttgccggagcggtgtaccagttgcgtagcagcgaggcctccattttcgatatcgccctggattttggtttcggctcccaatcacacttcacctacatgttcagaaagcgtttcaacattacgccctatgacttccgccaggatctaagtgtcgatctgcatatagagcctccgctacatattattcaccagaagatggcgtgagcagcagcgggctgtttaaatgacgacaaaagaaacggccccagaaaggagccgttggctgagtatgctagctatgtcagggttgttgattagtcatccagcgttactttagcgctaccgccacgagtacagcaatgcaaacccaaaacaccgccgtggcgatcacaacatgggataatcttgcatgggagagtaattgactcataaacacctcgcttacatcggcaataggactggcagaatttccgtacagattaatcttagcttagcagggctacgctatttacgacagcgtgctaattcagggtaaataacaatatttgattaacatcacaaacacatttaagaaatacattcactttaactattgatttcagcttaaatataattaaagtgaatttatttaggcaagttaaccaaccaagtccgcaggccatgccctctattcatcataaacaaagactgtcaaaaaacgcgatgccccttgctacgctaaggctgtagcggctttgccgtggcgggataaacgctatctaacgatcgttgccaatttagcgacacgctgccaacgaataattcaccacaacctttattagtggttaaatcgcagctagtgcgttaaatcccaaataaaccaaggcatatggcaaaaatttttcatcgtcgaatcaagaattgcgatagacgcagctctggcctcagccccctttgatgtaacagcttttggcatcgacctctttatcgatatgccgtagatcggataaatacgtgatgccaaacaggatcgacacgacaagcaacactgagaccaataaggcaatgaccgcaataagcttggtttcatcatgcggattgtgttccattttatctcctaaaaacagtaagttaatcccacccactgtgtgatcgtcaacgtaaaaatgatcaatatgcagcaaccaccgtcaacgttgtgatgacgcgttgcgcattgtccatggttttcctgatgtttgttgtctaatggggtgttcacaccctctactctcttatcgccagccataacaccttgatgctaaaaaggggtgactccaggctcaagcaacagccaaatttatgctggtgacaactaagatttttcttgcatgcagacgctaccaattttctgcaacagggtcaagattctcaggggtagtcacccacgtgcggactggaaacattcgttggatttatcgaactgcggttgggaaacgtataggggtgaacatctgtatgaacgtacgcattggttgaggaatttcagcacggcgccccagatggggcgccggatcacgcagctctatgttcgagcttcgattacctaggccttcggcatcattgtgggatgcgcaatacctggcctgggtagattttatctggatggcttagcatcggtttgttggcttcaaagatcttgttgtacaggttggcgttgccatacatctctttggcaacggcgctcagggtatcgcccttcttgacggtgtaaaagcggctttccgcttctggttgtgctactgcaacattatcttcaacgccgctgatacctgccacgttacctacagcaaccagaattttttctttcagttcctggctgataccgttcccggtgatcacagccttaccatcaacgacctgaacatccaccttatccgtatctggcaggccactgttatcaaggtgtgccttcagcttggcgctttgatcctcagcattaccactcaccgtatcccacagttttgcgcctgcttctttgacgaagttaaacaatcccatattcgctcccgttaatgattggatagttaagaaattttaaaactcattaagcttagcagtacagagcggaacttcaatcctcttaaggatgattaaacgctgccataattctgaaaatgccgtttttgtctggttaattattatttttttgtattaattagctaaattcagccaaattttacctacaatgggggttggagccttaatgggggacgcgataggttatgtacgcattggtgatgttcgtttgctatctggatggcggctgtgccgacatcgtcgtcgacgtgctgcgtgatgagcatcaatgcctggtagcaatgaaagaacaacgattacgccatgctggctgttttccgatcgaagactttatcgacggcttctggctacctgccagcgagtacgctcctttctgatccctcaagccaaaccgaaaaaggcagagcttgcgctctgccttttggaccacgttccgacacaggaatgaggtttgaatacgacttagaaacggtaggtcaagctggctgccacgatgttgtcagtgttcagtttcagcttgttatcgtcattcagctggttgattttataatcaacgtaggtgtacatgtttttgttgaagtagtaagtcgcaccgatatcgatatatttcaccagatcgacatcaccgatggtttcaatatctttacccttggactgcaggtaagccagtgatgggcgcaggccattttcgaactggtattgcgcgaccacttcaaagttttgcgtcttgttggcaaaaccagcagttttgttgacagtgatcggggtcatgttacgggtttcagcgtacatagccgccagatatacctggttggcgtcatacttcagtgccgtagtccaggccgtagcgctgtcacctttaccatacaagccgtctttttgagcctgcgtacggttagaatcagagaaggctaccgcagcaccaatgccgctaccgccgatgtcctgataatccacagacataccatagccgtcaccgttctgcttatggatgttactgcggtcattctcgttcttaccctgatactgcaaggcgacattcaggccatcaaccagaccgaagaagctgcggttacggtaggtagccaggccagtagaacggccagtcatgaagttatcggtgacagtataggtgtcgccgccaaactcaggcagcatatcggtatacgactctacatcgtaaaccacaccgtagttacggccatagtcaaaggaaccgtagttggcgaatttcaggccggcgaagcccagacgagttttggtgccttcggtacccgctgactcagcgtggttagcctggacgttgtattcccattggccgtaacccgtcaaatcgctgttaatctgcgtttcgcctttaaaaccaaaacgtacataggtcgcatcgccatcggcagatttgttatcactgaacaagtgcttggcgttaacacggccgtacaggtcgagtttattgccatctttgttgtagatttcggccgcattggccatcgaggcggcggtggcaagaacaaccgccagggctactacactgcgtttcatcatttattttcctagattttattaaaagctgcccgtcacgcccaatttatgctttgggctgtgatttttatcattttgttttttatctacgccccttaataaagcgccatgtgacattagcatcatgaataaaaacttaaaataaaaaagttcatgaaatagcgcacataaagcatgtttatttgtaactaaatatttcactaaaatactaatataatataatgatttaaaaagatatttaatgcataagccataacgcctacgctattaagcaccaaaatggtgcaaatacgtttcattttgtgtgatttacctacgattttggaataaccacaaaattagcatgctaagcaataacgttacttatttcacacttttaacttataccaatctgattagtagaaatggcgcgagtaattctatctttaatctgttttttactcattggggtcaatcatagtgagtaatggcacgtaacaggcaaaataccctatcaactgattaaataaattacgctattaaagtgtgaaaggaaaaacggcgccacaggtcacttacctgtggcgtaatgaacgggtgagattaaaacagggtactacgcgggacttcggtcaacatcatgcctgcacgcaaccccaatgccaccttggggttgggaaacaacacccactccttttcatgctgcacccgatagctttcccccggctgctcatacaataaagttccctgcggcagagcggtaaaattggcagtatcatcacttaaatagagtttgaacgattcactgcgtttaatcagcgaccgctcgacacggaacacccgaatcggagcctccccccgcaaaggaagagattgcccgcagaccagcgcctgcaacgctttattgatagcggaaaactgctgcagatcgttgctgccaaagggacgcgccttgcccaattcgagggtacagctggccgcctgcgcatgctcgctggaaaagtggctgaacgtgccgccgggcgcttgatgtatcactaatgcatccaactcggcggcgtccagtaacgccaacatctcggggctgtaactctgcggttgatagggcaggataccaaagcgtggcaacagcgatccgcggatcgccgtgtgtaaatcgtaatgaaagcgggtggcctgctccccggcaaagaaactgctgaccgcttgttctaactgctgcgcccgcgccgtttcaccagagggctcaaactgctgatggcggccaccaaacatgcgattcatatcgcttgccagataacgttgattggttcgcatcgcaggtggattgcccaacaccaccagcaagcgcaccgtcaatggccgcacgcctgcgaagatctcgttcactagccgatcaagcagttcgatcggcgccgtttcattgccgtgaataccggcagaaagcaccacggcttgccgatagccttgcagcggaatgagctccaatagcccttcccccagccacttccagcgcagtgcagcattttcaccctgggaggtggcgggtggagttccagccaacgttagggccaataaattgctcactattgcctccggttactgttggaacgggtaaacattacccagcccaaggatagaagtcagggcatccagcgccgcacgcccttcatgcagcagttgcgggtctgccagatcctcctgtaccagacgatcgcggtaatagcggtctacccagtcgttcagggtggcaaaaagcgtatcgctcatcatcacccgtgggttcaccgccctcaactcggcaccgttcagcgccacgcgtaaacgcaggcaagccgggccaccgccgttgcgcatactttcgcgcaggtcaaacaccttgatctcgtcgattggcccaccgctggccaccatctccgacagataatgccaaacgccaggatgctggcgggactcttccggcaccacgatcatcatcttgccatcggctttggtcaggatctggctgttaaacaggtaggtcgccaccgcatcccctacgctgacacgggaggttggcacttctatcgccaccagctccgtctccagcgaggccatcttgcggcggatttgatccagcccctgctgctggtgcaggaacgcctgctgatgatggaacaacacctgctgattgctgacggcgatcacgtcattatggaaaacgccctggtcgatcaccgctggattttgttgcagaaataccgtgtgttgctcgtgcaactgatgcaggcgggcgatcgcctcactggcctcgcgcgtctgacgagccgggtaacgcgtgggagcactttcaccgccaaactcctgcttgccatacacaaagacctgcaccccgcgtttggcatagtcgcccccaaggcggttatggttggcggcgccctcatccccaaagagtgccacctgcggtaaggcatcgtggtgagtaaagtattgcccatcattgaagatggcacgcagcacgctggaggtggtttcggcctcaatcgcgcgatggaatttgttattcagattggcggcggtgaaatgcactttgccatcctgactgtctggcgaaggcgaaaccgtcgcggcattggccgtccacatggatgaggccgaactaagcgccgagagcaggcgcggtgaggtacgcatcgcctgggccagtacgctttcgtcgctgccgctgaagcccaatttacgtagcgtagggagatgaggccgttcctgcggtggcaacacgccctgctggaagcccatatctgccagcgctttcattttcagcagcccctgctttgccgccaacttggggttcgacacgctgttacggtgctgcgtcgaagcctcgttgccaaacgacagcccggcatagtggtgcgtcaagccaaccaacccatcaaaattgacttcatatccggacattttgctctcctgtagactgcgaacggtcatgcctggggcagatcagttaaatatcaggcccggtgacaggctggttggcagcgtcagactggcactttccagcgaagccatcggccaagcgcagtaatctgccgcatagaacgcacttggacgatggttgccggaagcccccacaccaccgaaaggtgccgcactagaagccccggtcagcggcttgttccagttgacaataccggctcgcgcctccagcaacagccgttcgaactgctcccgctgcggggacaccagcccaacggacaggccatagcgcgtgttattagccatgcgcagcgcctggtcgaaatggtcgtaacgaatgatcgtggtcagcgggccaaaatactcttcgtctggcacgtccgccacgccggtcacatcgataatgccggggcttaataacgcgctgccgctctccagcgatttcatagtcaacaaagctttgccgcccaatgccaacagatggtgctgagctgccagcatgttctctgccgcagcggaggaaatcaccccgcccataaacggctggggttcagcatcccaacggccaatgcgaagcgtagacgccacctgaaccaaacgcgcaataaaggcatcgccctgcggcccgtttttcaccaaaatacggcgagcacaggtacagcgctgtccggcagaaataaacgccgattgaatggccagattcaccgccgcgtcacaatcttctacctgttcgacgatcagcgcgttgttgccccccatctccaacgccaggatcttttctggctgaccggccagttgtcgatgcaggtgatagccggtgccagcactgccagtaaacagcagcccatcaataccggtacagcttgccaaggcctcaccggtttcacgtccaccttgcaccagattgatcaccccatccggcaaacccgcctgcaaccacagctgtagcgtcacctccgccgtcaacggcgttaactcgctgggtttgaacactacgcagttgcccgccagcaacgccggaacgatatgcccattcggtaagtgaccagggaagttatacgggccaaacaccgccagcacgccatgcggccgatggcgtagcaccgaagcaccgtcggccatcgcggtttccgttaccccggtacgcgcctgataggcctgtaatgaaatgcccaccttgccaatcatcgcctgaacttcagtcaaggtttcccagcggggtttactggtttcacggctgatggtctcggccagatgttgtttatgctcttccagcaacgccgcgaagcgttttaccaattgttcgcgctgtgcaaaaggcgtgcgtgcccaggcaggaaaagcctcgcgtgcagctgtgcaggccgcagtcacgtcgtcaatattggccgaattggcttgccacagcggcaggttatccaacggatcggttttgctgaattcagcgccccggccagccagccagacgccattaattaacaatgcaggatgagacattacattttctcctgagcaataagcttgatgacccgtaccgggctcccctgttcgacacccagcgccgcagccgtctcggcgttgatacgcaagcggtcatcatgcagttgggcatgcaccaacagggcgcgataattctgatagttgtcgttggccaccaggtaggccggtgcctcgctgaatacctgcgcatcatccagcaccaccttcaccagtttgctgcgcttgaccgcgcggatctcgtcgatctcggcttccagcgtcgggcccccgtcaaagatatcgacgtagccctgatagcgcagcccttcagcttccagcagcttgcgcgccggtgcggtttgcgggtgaacttcgccgatcaccttctgcgcatcttcggccagaaagtcgacatacagcgggtgtttcggcatcagttcggcgataaacgccttttgcccggtgccgctgagatagtccgccttggcgaactcgatagaaaagaagtggcggccaacgctttcccagaagggggaacggccattctcatcggaataacctcgcatttccgcgatcactttgcgggagaattgattacgaaatgcggccataaacaggaagcggacctttgacagcagtttgccattctcgccatggcggtagtccggatcgaggaacagcgtacagagctccgaatggccggtatgatcgttgcttaaaaacagcgttggcaccgatttatagacattaagctgctttgaggcatgcacctgggtacccacgcggaagctgtaccagggttcggtcagcccaaccgcgacttcgatcgcgctgacgccaacgacctgttgccgttcggtatcctccatcacaaacagatagcagcgatcgctttggggaagttcgccttgccaggtttttaacgcccgctcaatacgtgccgacagcgtctcttcattctgcggcaaagaggtgaggccaataccggatttaccggcgagcgtcagcaggtcagccaggtcacggcgctctatggggcggataatcatcataatgcgaacctcggaagtcatcggctgcgcaccgggcgcagccgccttgattagctgcaaatccgcgccacagcacgcgcgaatcgcgccagcccctctttcacatcctgttcagggatgatcaacgaaggcgtaaagcgcaccacgtccgggcctgcgatcagagctatcaccccctcctcgttagccagttgggtgatctgcttggctctaccggcatattccgggttcagagcgcaaccaattaacagacccgccccgcggatttcgctaaagatcggatactgtaggttgatttgcgtcagcccggcgataaaccactcgagacgctgcttcaccccatcgagcacctccggcgtgttaatcagcgagaacaccacaccagccactgctgccgccagcgggttaccgccgtaggtggtgccatgagtaccaacgcccagtgttttcgccagtttgtcggtagtgatcatcgcgccgattgggaaaccgccgcccaaagccttggcggtggtcaacacatccggcactatcccgtaattcatgtaggcatacagcgaacccgttcggcccacgccggtttgcacctcatcaaagatcagcagtgcgccgtggcgatcgcaaagttcacgcaacccttgcaggaattgcgcttgtgccggtaccacaccgccctcaccctgaatcggctcaacgatcaccgcgcaggtacggtcattaatcacttgcgcagccgccgccagatcgttaaacggcgtgtgggtaataccgccaggcagtggcgcaaaatcctgtgaatattttggttggcccccggcagacacggtaaacagggtgcggccatgaaacgcgttattgaacgcgacgatctgattcttttctctgttgccactatccagggcatatttgcgcgccagcttcagcgcggcttcgttagcttctgcgccggagttgcagaaaaatactttgtcggcaaaggtggcatcaatcagctgtttggccaggcgcaacaccggctcgttggtataaccgttgcccagatgccaaagcttgcctgcctgttcgaccagcgccgctaacacctgcggatgggcgtggcccagagcattgacggcaatgcctccggcgaaatcaatataggatttcccctgctgatcccaaacctgtgagccttctccccgcaccaaaataaaatccgcaggggcataaaccgggatcatccagtcgtcgaaagactggcgggtaactgcgattggctgttccataatgacctcataacgtcagcaaaggctgaattttggcggtaaggaccgctctggcggcgcaagaccggcgaaaaagcaaattaaccctattattcggtgtcttttccggccgacgataatgctgctcaccgccgcctattcagatacaaacctgttacataaaatcggttattcactattaatgccgcatttagcaccccggagcggggaataaatgttaatgagtagttaaaatacagcccatttgataaatagtgtagagcagctatcgtgccagaacgggctttttgacggatttactaatttttttcgttaaaacaaggagttatattgcataaatattcaataattatgcatttgtaatgattaaaggcaaaaatagggcctaaaatcatcagcaccggagaaatcctattcaatcgcaaaattcttccacttttctgatcctgctcgcaaaaataattacgccagatggcgggatcggtgcccttttgcaccgcaattgtgcaatgcgccctcatttagcgcagcaacgcgccccctcaccccaatcctctcccacagggagggagagagacagtccgtgccacggtttatctgggtattcgtccttggggaggggaccgttcgagtggatctgaaacttgttatggtctaatgatcggtctccctacgggttaacccccagtctttgactacactgttaagctatcccctactcaatgttcctcctcaaccttaggatcccaacatgagcaaaaaaacctttgatgccacccagcccgcagcggttaaagacgtagccgcctttctggcgcagttaaatgccagcggcggcaaaccgatggaacagatgaagccgaaagaggcacgtaaggtgttggaaggcgcacaacgcagcgtggaggtggtacagcgtgaggtcgaaattgaagaaaaaaccattcacgtggccggtcaggacatcctgctgcacatcgtgcgcccgccacgagtgaaaggtaaattgccggtatttatgtttttccacggcggaggttgggtattgggcgacttcccgacccacgaacgattggtgcgcgatctggtttacagctcaggagcggtagcggtatttgtcaattacacaccgtcaccagaagcccactatcccaccgccatcgagcaagcctacgcggccacggaatgggtggcggaatacggagagaaaatcaacgtcgatggcagccgactggcggtagtgggcaatagcgttggcggtaacatggcgacggtggtgagcctgatggctaaagcgcgaggcacaccggcactgcgctgccaaatcctgctgtggccggtcacccacgccagttttgatcgcgattcctatcatcagtttgccgaaggccatttcctgacgcgcaatatgatgaagtggttttgggacaactacaccaccgacaaggcccagcgtaaggagatctacgcctcaccgctcaatgcgagcctggaacagctgcaagggctgccacctgcgctgatccaaaccgccgagctggacgtactgcgggatgagggggaagcctacgcccgcctgctgaacgcggctggcgtcgaggtgaccgccacccgctacaatgggctgatccacgattacggcctgttaaacccgctcgcccaggttccggcggtccattcggctattcatcaggccggacgcgcattgaagcattatctggcctagcccaggttacggatcagcctggccaaggtcttgatggcggtttcaagcctgtcgctccactcgaaagaggcgttcaggcgaaaacagtggttgaaacgatcgccggtagtgaacattcgccccggcgcaatactgatgccctctgccagcgcacgctggtaaagctccatggaagactgtgtcgcctccagctccagccacaggaaatagcctccgtccggctggctgaccttcaccgttggcgggaagtgatgggcgatcgcctgatgcatggcgctttggcgctgggccaataaacgccgcaagcgacgcagatgggtatcatagccgccatgcagcagataatcggcgatcgccatctgggtcggcacgctggttgaaacagtgctcataagttgcaagcgctggatctgcggcgcatatctccctgccgccacccagcccacacggaaccccggagccagacattttgagaacgacgaacagtgcaaaatctgtccgccctgatccaacgccttggcaggcaagggccgctcggcgctgaaataaagctcgccgtacacatcatcttccagcaacgagatctgatgttcgcgcagcatcgtcaccagccgttttttattatcgtccgacatgctcgacccttgcgggttctggaaatgagtcatcaaccagcaggccttgatcggatactgctcaatcgcctgctgtaacgaatccagatcgatcccatgctgcgggtgggtagcgattgccaccgctttcagcttcaggcgttccagcgcctgcaacgcaccgtaaaatgccggggattcaatcgccaccgtgtcccccggctgcgtcaccgcttgcaggctgaggcttaacgactccatcgccccggcggtgatcacaatctcatctggggagacctgcatcccattcagcgcatagcgttgggcaatatggcgacgcaatgcctcgttgccgggtggcaaattagcaagcgaactgtgaggcgtgaatttccgggcgacgctgctcagcgccctggccaacttgggttgcataaacagggtggcatccgggaaagccgagccgaagggcacaatttctggatccttacaggcttgcagcacgtcaaagataaaggcgttgatatccacctgttcgctcaccagcagtttttcaccccgtatgggctgcggtaacgcctgtgaacgggccgccacatagtaaccagactgaggccgcgctacgatccagccctggctttccagtagctggtatgactgcaccaccgtcatcaggctcagcccggcacgtttaccactttcccgcagcgagggcagtttgtccccggcacgccatacccggttctggatctgttcgcggatctgctgggcaagctgttcatatctggtcatacaattccaactgttataggaaaaagtaaaataactgtcactgttatcgttactctactccatgctctacttagcgcaagttttaataagcaagctttcgctttcctaagaggccgattatgaacaaatcaaggaggctccatgttcggacttgatgcattggagctggcacggatccagttcgccttcaccgtttccttccatattatcttcccggcgatcaccatcggtatggccagctatttggcggtgctcgaaggcctatggctgaaaaccggcaatcaggcttaccgagacctgtaccacttctggtccaaaatcttcgccgtcaactttggcatgggcgtggtttccggactggtgatggcctatcagttcggcaccaactggagctttttctccgaatttgccggcagtatcaccggcccattgctgacttatgaagtactgaccgccttcttcctcgaagccggattcctgggcgtgatgctgtttggctggaatcgtgttggccccggcctgcacttcttcgctacctgtatggtagcactcggcacgctgatctctaccttctggatcctggcttccaacagctggatgcagaccccgcaggggcacgagatcatcaatggagtcgtcgtaccggttgactggttcaaagtgatcttcaacccgtccttcccttaccgcctgctgcatatgaccactgcggcattcctgtcgtcggccttctttatcggtgcctcagcggcctggcacctgctgcgtggccgtgatacgccagccatgcgcaagatgctgtcgatggccatgtggatggcactgatcgtcgcccctattcaggcggtgatcggcgacgcacacggtctcaatacgctgaaatatcaaccggccaaaatcgccgccatcgaaggccactgggagaacccgccaggagaggccacgccgttgatcctgttcggatggccggatatggagcgtgaagaaacccgtttcaaggtggaaattccttatctaggcagcctgatccttacccacagtctcaccgagcaggttccggcgttgaaatccttcgcaccggaagatcgcccgaattccaccgtggtgttctggtcgttccgcatcatggtggcgctgggcatgctgatgatcctggctggcgtgtggagcctgtggctacgctggcgcggcggactctatcagtccaaacccttcctgtacttcattctgtggatggggccttcagggctgattgccttgctggcggggtggttcaccaccgagattggccgccagccgtgggtcgtctacgggctgcaacgcaccgccgatgccgtctctgcccatggcgacatccatatgagtgtgagcctgctggcctttatcgccgtctactgctcagtgtttggcgtcggttattcctacatgatgcgcctgatccgcaaaggcccgcaggcccatgaaggtgacgagccaagcggccacggcacaccggcacgcccgctctcagcggtacacgaaactttggacgacaggagctgaacatgggtatcgatcttccgttgatttggtttgtgatcatcgtgttcagcaccatgatgtatgtggtcatggacggctttgatctgggcatcggcattctgttcccgtgggtgaaagacagccacgatcgcgacgtaatgatgaataccgtggcaccggtatgggacggcaacgaaacctggctggtgcttggcggggccgccctgtttggggctttcccactggcgtatgcggtgatcctggatgcgttggccattcccctcacgctaatgctgtttggcctgatcttccgcggtgtggcctttgagttccgcttcaaggccaaaccggagaaacgccatatttgggacaaggcgtttatcggcggctcaatcctggccaccttctgccagggcgtggtcgtcggggcgattatcgacggcttcccggtagaaggccgcgcctatgttggcggccccttcgactggttcactccgttcgccctgttctgcggtttgggcctggtagtgacctatgcgttactcggctgcacctggttggtcatgaaaacagcgggaaacctgcaggcccggatgcatcgtctgaccacaccgctgttggttagcctgctgctaatcctgctggccgtcagcgtctggacgccaatcgctcaccctgaaattgcgacccgctggttcagtctgccgaacctgttctggctgctgccggtgccgctgctggtgttgctcagcgcctgggggatctggcacggcgtacgccacgatgcccactactcgccgttcctgctgacgctgttgctggtatttctggggctaagcggcctgggtatcagcatctggccgctgctgatcccgccgactatcaccctgtggcaagccgctgcaccgctacaaagcctgggcttcatgctggtgggcgcactgtttattattccgattattttggtttacaccttctggagctactacgtgttccgcggcaaggtgagccatgaggatgggtatcattgatgatgaataagacgatgaatgagaacaccgccaccattccctggtggaaacgcgtcggctggttggtgattatctggagtgccagcgttctggggctatttttggtcgcttcgctattccgcctgctgatgaccgccgccgggatgaagccggaataactttacggtttccccatcatccccaaaaaacgctgttgcatctgcaacagcgttttcagatccaggcactgataatccagcccgtgctgggcagcgacttcggcaataatcttcgccagagccgggtaatgccgatggctccaatgcgggaacagatggtgggtcaggtgcaggttggcaccgcccagccagtaaccaacccagcgtggcgtggcctgccagtcgaaggtggtggaaaacagatgttgataccagccatgcaccatcttgccctgctcgggaacctgatagaaattggctttggcccaatgggtaccgacaatcaacatcacaaacaccaacgacgacagcatctggctcagcaggtaagttagccagatcgccgtggcactgacctcaggcggcatcagccatagcgggattgccaacgccaacgtgaagtgcgccagcttgctcagcaagaaaacgccccagcctttgctcccctgcaacatcatcttgggcgtcatgcgcgttttgccagcccgatccaaccagtcaaacagccagatgtaatacgggaaagtcagtgccgccactatcggccagtagtattgctgcaaacgcataaaggttttgcgctgctggaacggcgtttgccgcagcacgccgttcggctcgatatccggatcgtaaccttcgatattgttgtaggcatggtggaagataacgtgacgcacccgccaacagtctgcatcaagccccaacgggatgctcacaataaaattaagccagtggttcagccgtgcctgtttgaaaaaggcattgtgtgaggcgtcgtgcaccacgttcaccgtcaacatcatggcagagaaaataaagccgacgtagcagccgaaataggcccaggcattttgctgttgcaaactgagtgcataaaagcccgcgcacaccaggatcagcagcaacactttggcgaacatcccgcggtcggcaaagcggtggtcgccccgctccgccagataggcctggctgccacgcatcagcgccagatgaatgtcgcggttctcacgttggaacgccaagggccgcaacggcgtggtgtctggcattttcatcgtggctgttgccccatcgtacgtaggaagcgttgctgctgttgcaacagttcgcgatagccgatgcagcgataatccatggcatagcgtggcgcgagttcagccaggatggcggccagcgcgggataatggcggtgattccagccggggaacagatgatgggtgagatgataattcagcccacctgtcagatggtgcaaccactttggcgaggtttcccagtcgcaggcggtggcaaagttgtgccgataccagccctgcggcatttgccccccctctggcaccgcgtaaaactcggcctgcgcccagtgggtacccaacagtaagaacaccaccagcagcgaggccagcatctggctcaacagataagcgatcagcaccgtttgccagccgataccgtgttgctggcnttttcccagccgataccgtgttgctggc

SEQ ID NO: 339 - DNA, 3524 bp, unknown
  Altogen  635822 strain
tatgtcggcaataacacagcattgaaaatacaggacaataactggcgctataaaattaaatagaatacattcacaagatatcaatgaatggtagttccgtgttgaaagccttttcagcgaacctttatcccttaccccatcacgagtcattcgtccggtgttgcatactaccttgctgttgggataaatattatcgccgaatacggaatattcttagtgaagtaatattaaacgtggagaaatccatttaattaattaaaaatcaacaagttaaagcccattcttatatgaaaaacaagatttatttattgttctaacagcaccaccacaccatataagaaaatcaaccaacaaattgatatataacagaaaaatactaagaaaagggatagtacccgggccagcagacccggcccggcgataccgcgttcgataggtcggaaaggggtcggggcctgaacgatatggtcacacttttggcaggcatgcttttcccgcattgtgcggataacccggaaggcgctgcgtatcagttccagttgctcggccgtagtgggatcatcgtttgagttcccgtatcaacatcgccagcagattttcgctgacggcaccattgaggcggagtgctccgtgccggaacattatctcacaggatagcgggagcgcttccgattcagcaggggtggatgagagttgattagcggattcgggttcggattcaagcgttaccgggagtaacgcgggtatagttgcttcaggcgatgacgatagttggagttttccttgccgccagtgttgacgccatttaaacaacagattggcattgataccattgtccagtgccagttttgagatagagacgccgggttcacaggaggctgcaacaagccgttgtttaaactcaagaggataattgggatagccttttcgcctgccgacaataacatttttctgggtatatgacattttggttcccactactatctggtgggaactactttgtcgaatgtgtcagatattcgccagacggtacacggtgtacgcttacttttcattggtgcacctgtgttgttctgaggtgagcatatcacctctgttcaggtggccaaattcagtaaaccacttcacttcctatacgttaccggaagcgtggaacagcgagtagaacaaatacttgaccacatttctcccttacaggctttgaacatttaaacacagaatatgcgactggatatatattggcacaataatgcggctatatggccgtagtcgataggctgccaggcagcaacgatttacgtgtggcgaaaccactcaccgaatatgtggtggtttctaagctgcctgtacggcagtgaactgttacatcctagcgctaattctctgttacttaaacagtaaccttgaaaccctccggaaaacccttttttcatccactcactatccttattttaaaatcaatgggttatgaatggcttcaaaattagggtctggagggacactacgagagtcagggatgggtacaggttgcgggatgattacagagctaccaatggatgaatgcagctcgttttttataccaccgtgcgaaagtgtttcagtgggggaaaaggagatgggagccatagctcccatcagtttgatggttaagactacggttctctattggcaaaccgaatcgaagacctggatcgccgaaacgggactgttttttgcctgcggcatcagcatataccccacagtacattgcatttcactgccggcgccccatttcacaatcagttctcctttgtctttcgctacacgagcatacatttgcccaccttgccccacagagcccacactgttgcctttgctatcaaagatatcggcgccgaacggtaccggttcaccctgataggtcgcattcaccagaattgccgtcccctgtttggtgttgtatttcaatttcaccaccgccccggaatacggcgcaactttctggctggtgttatccaactcaacgtccgccgcggtgcctttcggatcaatactgatttcattcatctggtagggattcagataaggcaccattgcatagccgcgggagttaacgttcaccccaggatacgacgacacgctggcaccttctgctcccttggcctctaccagggcaaaggtgtctgaggtgtagggagtaaaggtgatccctcctgcgtgggcgatcaccgtccctgtcataccggcagagccgctctggtagcctttcccggtgctgtaggttccactcaatgcactgacccggctgcgatagttaccattcaccgacccgctggtgcccatcccctggttggcgttcatcgcggttatgccataactgagctggttctccacaccggaagtaccggataccgtggcctgctggccataacgcccactgctgtcatgagacaggtccattctcagttgtggcgtgtggagttcgtcattccggcccagcggcaaactgaagcttagcaggtagttggtttgcatctgcccgatgctcgagtgactgcggttggcactgatgccgtaggacaggctcttataacggttgttataccccacctgatactgtatatcgctgccatcctgattccagtagtcctgcactgagccactgacatacagttgcccccagttatccggcaagccttgccctgcggtcagcgtcaggcggtttttgactcgtgatatggagtccagaaaatccccctgttccgccgcatcacgggtttgcgcggcggtcaaaaaatccaggtaattttgggaagaagagcgatggaataccgccgaaaggttgctgttggtttcgctgataagcttgctgtagctcagttgataactctgcccgcttagggtgccgcctggctggctccgcccgttcgcatcggtgctatcacccagtttcgtgccggcctgagtgacgtcaaaggccagtgcccctatcgggatccccaatgccgcccctacctgcaccgcatagtagtcctggctgatttgcagcccaccatagccggtaatggcattggtcaggccatattgataggtactctgtaataaagtcggttcatcatgcaggttttcgctacgcaattgacccgcagtgacggaatagcgcgatgaccccgggcgcaacagttgtgccaccgaagcataaggcacactgaaggtctgctcggtgccatcggactcacgcacggtaaccacaagatcgccaccgtagccggtcgggtaaaggtcattaatcaggaactccccgggcgtcaccgtggtttcatacaatacctggcccccctgggtcacggtcacccgggcattggtgcgggcgatcccccgaatctccggcgcatagccacgcagggattccggtaacatccgctcgtcgctggccagttgagccccggtaaatggcaaggtatcaaacaattgcccggtagtattcgattcccccagcaacatacgccctttcagttgcgggatgtcgcgctgtaaataggtat

SEQ ID NO: 340 - DNA, 656 bp, unknown
  Altogen  635822 strain
ttggcatcacaaatcatttccgtgacggtgtcgtaaacctgttggtggttttccatggttatatccctatgttaatgatcggccactggccatgtttttaaggtgacggaagtcgcgagcagcggatgctgctgcgttctggcctcgatcaccgtgcgtaacaccaatccgctgcttacattcccgatcaccagcatcggctgaatgcggtagtacagccgatcttcgggtgcaaaaagcgcttcggggttgaataatcgggcactgaagtgggtttcatggtgcgtctgtaccacagggctctgggcaaacacctcaatcagcgtggtggcctgcagttccggcaacgtcgtcgccagcatcgccacggtttccggcgatttcaccagcagttggaacagcagggcgtcaaagaaactccacgcctgagcggcatccgatgcctgccccgggaacggctggcagagtgccatcacctcgttaacggtcagcgcatgttcgtgatcggaagccaccaagtctagtgacctggccggggccagcttgctgctgaaacagctttcctgcgtggcacaatcccgcaactcaccggtgatctgcttgccgttgcccgctatctgcaagtgatacggggtctggcacagcaccggtcggcg

SEQ ID NO: 341 - DNA, 657 bp, unknown
  Altogen  635822 strain
ttggcatcacaaatcatttccgtaacggtgtcgtaaacctgttggtagttttccatggttatatccctgtggttaattgtcggccaatggccatgtttttaaggtcaccgaggtgacgagcagaggctgccgctgcgttctggcctcgatcaccgcgcgtaacacaaatccgctgtttcggtccccgataaccagcatcggctgaatgcggtagtagagccgatcttcgggttcaaatagcgtttctgggttgaataatcgggcgctgaagtgggtctcatggtgtgtctgtaccaccgggatctgagcaaacacctcaatcagcgtagcaacctgcagttccggcagcgccgtcgtcagcgccgccaaggtttccggggatttcaccagcaattggaacagcagggcgtcaaagaaactccacgcctgagtggcctccgatgcctgccccgggaaccgctggctgagagccatcacctcgttaacggtcagcgcatgctcatactcagaagctaccagctctaacgactgagccggagccagtttgctgttgaaacagctttcctgcgtgacactgtccagcatcttgccggtgatctgcttgccattgcccacaatctgcaagtgatacggcgtctggcacagcaccggtcggcg

SEQ ID NO: 342 - DNA, 196 bp, unknown
  Altogen  635822 strain
atcgtcgtcgttccgtacgtgccaccgccgggcgttttcttcgtggcgatggtctgcgcgatggcagcagcatcgccaccatcgaccacaatcgagatcgagtgaggaggtaagccgtttgcatcggttacgtcggtgtcgttctcatatggcctgtagcgctctacaccagacagtgtggccacggctcccatga

SEQ ID NO: 343 - DNA, 196 bp, unknown
  Altogen  635822 strain
atcgtcgtcgttccgtacgtgccgccgccaggcgttttcttcgtcgcgatggtttgggcgatggctgttgcgtcgccgccatcgaccacaatcgaaatcgagtgcgcgggtaacccgttagcgtcggttacattggtgtcgttctcatatggcctgtaacgctccacaccaggcagtgtggccacggctcccatga

SEQ ID NO: 344 - DNA, 32730 bp, unknown
  Altogen  635822 strain
  misc_feature (151)..(213): n is a, c, g, or t
tcggtgacgggcatcaagggcaacaccgggcaaacggcctacggggccagtaaggcggcgatgatcggcctggggaaatctctggcgctggaagtggcgcgctttggtatccgggtgaactgcctgctgcccgggattatcgaaagcgagnnnnnnnnnnnnnnnnnnnnnnnnnnnnnnnnnnnnnnnnnnnnnnnnnnnnnnnnnnnnnnntcgcttggggaaagccagcgaggtagcacgtattaccgcgtttctcatcggtgatgacagccgttacatgacggggcaaattttggtgctagacggtggtttgaccgtctgagcgcgttaatgcattctgtatcaagtcggggcactgtctatcggtgcccctttttattaccgtacgttcctgcgaattaatttttctccgtttgatttttaacccaatcattatgcgtattttctgataagaccgcctttttatataggtggtagctatgttttcaacttattttatgtgcttttattttgggatgattctctgatgaatccgttgtaggacgcctatctgtttaatgtcctattggttgtcggggatggatattattccattttccatcaaggtgcatttatgttgtatttcttgctttcattatgttgttgttatgttgcataactcaaccctgctgttttattaacctataactgagctgaactactgattttaatctaagtgttagctaagttgcgttagatcatgggtaattagcattgttccatgacctggctgtttcgtgattacttatcggctatactccgctgaggatccaggatgttatccgaaggcaggggcaaatgctcctgagcgttgttgtggaaataaaagggaggaaaaatccacatacttttggtgaaaagtcaaagaggtactatgaccagtcgtaaacatttaacgccttccgaagtggaaaagctgctagaggcaacgctgaaaggcaagaacccagagagagattactgtttgatttatatgtgctttattcatggttgccgcgtgagtgaaatcaatagctggcggctgtcagatatcgatcttgaaggtggcaatatttatattcatcgattgaagaacggcttctcaacggttcatcctttgtatgtgcgcgagcggaaatgtttacagcgttggatggccaagagaaaacagtaccgtggcgcggatagcgagtggttgtttctttctaaccgaggatctcgtttatcacgccagcgtatttattggctcattcgtaattacagtgaagcggccaatctggaggtcaatgcacatccccatatgctgcgtcatggctgcggttttgccttggcggaccggggaatagatacgcgcttgattcaggattttcttggccataggaatattcagaatacggtgctatatacggcaagcaatgccaggcggttcaaggaagtatggtgatttgagtaaggaaaatatgtctaatgagtcactttgaactaaattgcaacatactctaaggatactcaaaaataatgtcaacactaactattcaataattcatattgatcgataaattcattaaataacaatgagttaaattgtttttcccataaagaatcctcatccagccttaagtgttttcttacttgaccacctaaaaaaatccaagatcgaaactcgcctgttttataactagttcataatccttttatatttgtaatttacagagcattgagctatgcgttgtttgttttaaggccttccttggcacgttaaaccaaaggagtcactttagttcaaaatgaatcgtttggctggaaaggtattactgccccattgctatttgcggaggcgtgtttcagtcgatgaactaaataaaaaggaatgacatagggttatgtcaaaaataaacaaatgtgcgtatttgaagtgcattatttaaaaggaaaagtagtatatgaacaagaatctgctcgccgtggctgtattggctgcctccgcgtttaccaccgctgcgttcgctgcagacggcaaagtcaacttcgctggtgaaatcatcgatcaagcttgtaccgtgcattctgactcagaaaaccagaccgttactctgggtaaagtgtatgtcggcgcattcaagggtggcgctggcgtcactgctgcctctaaggatttctccctgatcctgcaagactgcccagatacggttaaagcggcgacagtgcgttttgatggtatccaggtcgcgggtaacgatgccgttctggcgctgaccgatgagccaggtgttgccaccggcgttggtgttcagattgctgacaacaacaacaaagtgattaacctgcacacggattcaagcgtttacccgctgagcaataccgaagataacgtgctcgggtttgttgcacgttattacgcgacttcagccaccgtaacggctggcaaggctaacgcagtgagcaactttaccattatctatcagtaagttttatccgctcggctgatacgggcggtataaggctggtcaggggaacgaaagtcaccccctggcctttctctcaatggtcgaagtggtgaataagcaatgaaagtctggcggagcacaatagtcgcagcgctgttactaacctttggtgcgcagatacaggcgggcattattgtcggcggaacgcgcctggtttatgacggtggtaaaaaagaagcctccctggggatcaataatccggataaggtgccttatctcattcagtcctgggttgacacaaacgaaggggatacctccaaggcaccatttatcattaccccccctttattccgtttggatggcgagcagaataatatcctacgtgtagtgcgtgcaggggggaatttaccgaccgataaagaatctctctattggctgaacatcaaatctattccttcggccaagaaacaggaaaacagtttgcaaattgcggtcaagacgcgcatcaagctgatttatcgccctcaggggttacccggtacgttagaggacgccgccaagacattgacctggcagcgtagcggtaacgcggttcaggtgactaatgcatcgccctattttatcactctattctcagtcaaggttaatggtagcccgctgaaaagtgtcagcatggttgcaccgaagtccagtgcacgctttgaactacccgaaggtaactctggtggggcattgagctgggaagttattaacgattacggcggtattactaaaccgtttatcgggaatctataaaggcattcaccagattaaatacagctaatccctgcacaggtagtacagggaagggacgcggcttgccggaatttactggcgcggctgataaatggagttaaatggatgaaaaacccgaagcgtataggctcgcgcggatttaaccgtacccagctggcgtggttaatcccatgccaggttgccatgttaatgggaatgtccggtagcgcacaggcccgcgattactttaacccggcactgctggagcttgataatccgtctcagcgaggggccgatctgacggtgtttgaagatggtcggagtcaggccccaggtacgtaccgggttgatatctatcttaatggggcgatgatcgatacccaggatcttgatttctccctgcaacggagcccggcaggtgaggatagcctgcagccttgcctaagcagcgatatgcttgaggcaatgggggtgaagatcgcttccttccccgctatcccggcctcggggcagtgcgttaatctggcgcagatcattccccaggcatcggccacgttccgttttaatcaacagcggttggatatcagtatcccccaggcggcattgaactcgaccgtccgtggctatgtttcaccagatcagtgggatcagggaataccggcgctgttggtcaactataactttagcggtgccaatagctgggcacgaagcagtaagggctcggacagcaatagctattatctcaacctgcgttcagggatcaacctcggcgcctggcgcctgcgtaactactcaacctggaatcgtgactctgatggtgaaagccactgggattccatcaatacctatttacagcgcgacatcgtagcgctgaagagccaattgatactgggcgatagctcctctcaaagtgaggtgtttgacagcgtgcctttccgtggcggtcagttagcctcggacgatgacatgctgccagagagtttaaggggttatgcaccgacggtgcgcggcattgcccgcagtaacgctcaggtcacagttcgccagaacggctatgtcatttatcagagctatgtgccacctggggcctttgaaatcagcgatctctatccgacggcgggcagcggcgatctgcaagtgagcgttaaagagagcgatggcagcgagcagaggttagtggtgccgtttgcttccgtcccggtattacagcgacaaggacgtttcaaatacagcctgaccagcggccaatatcgttcatccaacagtaacgtggatgatacgttgtttactcaaggcacggcgatctacggcttgccgaggggggccactctttacggcggtgtgcaggccgctagcaaatatcaggcactggctttcggctgggggcaaaacatgggggttatcggcgcgttttcaaccgatgttactcaggcttggtctaaacctgaatttgctgccaaagagcgcggccagtcgtggcgtatgcgttacggcaagaactttgttgaaacgggtaccagcttcaccttggccagctatcgttactctacggcggggttctatacgctgcaggaaacgttaaatacctataccggcggcaaaacatcacaaagtcagaatcacaagaagagtcgtgctgaactgtcgatgagccaagcgttatgggagggggcaggttcactgtcgctcagtctgtacaacgaagattattggaacgatcggcgtcgtaaccagtcggtgagcgtcgggtataacaatagctggaacagtatcagctatggcctgaactacaccttcagcagagatggttatgacagcagtggcgaacgcgtcaactacgacgaccatattctcgcctttaatatcagcatgccattgggcggacgactttctgacagctatgcaagctacaacctgaataccagccgtaaaggcaccaccagtaactccgtcggccttaacggtaccgcattacccagtaataacctgagctataacgtcagccaggggtacaccagccagggagtcggggcttacggcaatagcagccttggctatcgtggcggcttgggcagagtcaacgtggggtatggctataaccgttccgatcaacgcctcaactacggtgtacagggcgggatcctcttgcacgaagacggtttgacactctcgcaacagatgaatgagacggcggtgctggtgaaggcaccgggagcccagggtgtcaatatagccaaccaatcaggggtgactaccgactggcgtggctatgccgtggtgccttacgccacggtttatcgcaaaaacaatattgcgataaacaccactactctgccagatgatgtcgatatgacgataaccagtcagacggtgatcccaacccgtggtgccatcgtgcgcgccgagttcaaacctaatgtcggccagcgggtattgatgaccctgttgaggcagggggcgccaataccgttcggtgccaccgtaaccgatagcaatgggggtgacaacggcagcatcgtcggtgacggtggtcaggtattcctctctgggatggccggtagcggcaagttgcaggtcaaatggggcaacgccgcgtcgcaacaatgccaagtgtcttacagtgtgccggagcaaaaagaaagtgccgggatccgtttgatgaatggccaatgtttatgaaggctttaatgatgaataaatggaaatcgttagtgcattattcagccatcgggggagttatcgccttggggttggggagcctgccatcggcgcaggccgccatcgggcagtgcgaacctgcaggctcgactatgggttatcactttacgtttaatcagctgttcgaccatccggataagaacacggctggcaagacgttttatgacgtgaataaggccgaaaatgtgtggcagaacgagggggacgggtatctggtcaactgcgactgcggtagcgaaactcggatgaaagagtcgtttattatggctgtcccaaggggggcgcctctgccggatggggatggtagtaggcagttctattcgttgagcggtagcgaggatttttctgccgctatggaggtgtatattgccggtgctgtcaataaatatttccctgtgcctttccccggcaatggatggatagggaatggcttttttaaccggccacaggattgtaagggcgtactctatgatagtggtgcacaaggattagttcatctctatttcaggcaggcggttattggcacgtcgacaataacgcattctcccctgttggatgtctatattaattcggatcccaatgtaggccgggggagcagaccaacggcctcagtgagcatgagcggtaagatcaccgtgccgcaaaaatgcgaacttaaaaacccaatgattaccgtgccctttggcagcattatgtccaccgattttaacgttaaaggccaaaagccaagtaccgtccagatacatgaagaaaccctgtatctggagtgcaccaacctgtcgacgcgcgcaaaaatcagcttgctgtttgagggcgaggtgaatcctcatgatcccacggctcttaagaccaccactaccaacggttcggtgacgtcggataatgatgatattgcgatcagaattgaagaaaaacgtggtggaaacacccaggttatttcgcctggggacaaactgtctatggaaatgaatggcttgggtaatatcgatagtgatagtcagacgacattgaatatctaccctattagcacgaccggcaaagcaccgaaagttggagactttgaggcaaccgcgactattacggtaaaaatggagtaatcccatttgcatcggaaatctcgggctttctgcgaaagtaagtttaactaaaatggagaaggatatttattatggatatgaaagcaatttttaaaacgactgcattgtgcctggctctcggtggtatggggatcagttactcggctctggcggtcgatgcacgcataaagatcaccggtacggttaaagcttcgccgtgttcggttgatgccgtggggggcgatgtcaatgttaatctgggggagatcaaggcacatactctgaccgcgggtgcggggagcgattgggagagttttagtctggatctgagtgactgcccagcttcaaccactaacgtgacggcggcattcaccggtacggcagcggaggaaagcacggatttgtataagaacgaggcggccaatcctgccggtgccgtgcagattgaaatggttgatggcagttcatcagctaatcgccggttgggcagcggcagtgatatgaccgtggctgtcgatcactccaccagtaaggcgagcttcccactgaaggcgcgagcttttagcactaacggtggtgcaaccccaggtagtattgagggcgttgtgcaggtggcactcacctatcagtaatcaccagtaataccctctagccataagaaaacctggccccacttttttatggtggctttacctgtgtctgttgggttaattgccaggggcttattaattgttggtagctgactttattttcaatgtgttgtttgatcaataaaaacaagaaaagatagccctcataacgatgagagggaatgacatttttgcacaccaatttatcaaggaagtaaaaaagggtatttagcagaaatgggaggtttaatatgacagtggttcatacttatcagagagggagtgcgcattcccccagtccttatgggctaaaaggggacggtgtgattgtaatggaatcttgccccatcacggcactcggaatgcgtaatattttggcccagtcctgtggcctgacggatgaggtacaacgggtcagtaatctggagcaaatcccaggattgatgcgccaccgcccggcccggctgttgattatggagctgtgtggtgaagaagagtcggttctggatggtttaaggctgattgcacagtgcctggagcattggccaaccacggcgatgatcgtgtgtaccgctcttgacgatcctcgggtgctgcaattgctgaccgcatcaggcatcaaagggctggtgctcaaacaggagcctggcgttgcgctggcgcaatgcgtaaagcaggtcttatcgggctgtcgtagctatagccataaggtgcggcaaatgctgagcagtcagtctgccattggcaaagctttgacgtcccgtgaactggatgtgttaacgcacctgttttctggcaaaagcgtgaccaccgcggcgttgatgatgcaccgtgatgtccgcaccgtcagcactcacaagcgtaatgcgatgcacaagttgggctttcagaatgatggtgaactttatttgcaaggcaagtggatggcaaagaccggcccggtgtttgcccgctaacccttgataccgctatacacttattctctggatggaatcaacgagatatttatacaggagtcgtctatgcaaccgttgtcacaaaagccgcttggcttggcgttaatggatcgcagcccactcacacttactgggctgtcttgctttattggcacgcttaacgtcgccaatgagattattgtgcaggaaaccagcatggctgcggttgccgaaaggttgctgtaccaacctgtcgatattctcatcactgaactcaatggactgaatgaaaccatcgcgcagtgccgtgaagttctacttaatctgtgcgcgcagcagcctgagttacgggtcattgtttacacccgcagccagacaggggaggacctgtgcaagctgcttgatgtggccaatatcagcgtggtatcccgtggggatgagttgccgctggtcggggagttctttcaccgggtatttaacggtgagcgtgtattaagcccgttgatcggctcttatctggcgcgtagcgatcctgaggatgtttcaagcctgcatcatctgacccgttgcgaaaatgatgtcctgtcgttcttgttcaacgggatgagcctgcgggaaattgctgaactgcaacaacgcagcatcaagaccatcagcgcgcacaaatgtaatgccatgcgcaaactacaggttaaaaacgacagcgagctgttctcgctgagaaaaaacattagccagcagtttgccggtgattaatggctggaaatcgcttgatgccccgccgtgctgtcatcaagtatggcggggcataccgcagagctgacggcacggtacctcgatcatccagctatccatagatattcagaccggcattctcggagctgccaaatcacggcagtatcagggtgatcgtgccgccaagtttggcttatggcaataaaggcagcccctgatatcccatcgtgatcggctatgatatataacataagaatattggctgctgcacagctagctacacttgcgaagtaaagaatgcggtgccagtttgaatcggtggcctgcgttgggttaaatatgtattacccgaaagcgttcaacattgctggcagtataaataacggtgttctgaatgttgcgatggcccaagtaatcttgaatgagtctggtgtcgatccctctatctgccagggcatagccgcaggagtggcgtagcatatggggatggacctggacgtcgataccggctaattcaccgtaggactttattaatcggtaaagttgttggcgtgaaatttgcccaccgtggcgagaaagaaacagccaggggctatcaggttccaggtagcttgggcgctttgccagccagcggcccagcgcgatacgttcgcggatttgaataggatgctggaccgaaaaaccgttctttaggcgggatacgtgtaagcggttggtggccaggtcaatatcctccagccgcagtccccgtagttcgctgacgcgtaacccatgaataaagcacatcaacagcatacagcgatcgcggcaaccgttggcgccgtccgggatggcggagatcattctctcaatttcaatatggctgagatatttgcgttttgtcattctctatccctaagttaaataaagcaaatatggcgtgtggtttattcatttaaacattgaatacccttatcagcaaacaaaatagcagtgttactgcggggttaatcctgccgtattatcctattactaggggcggcggggggttaatggttatttattaagaaaaaatcaactcacttgatcatcaggaaatcctgtttgatgggtttgaaaagcgtatgtttagaaatgatttacctaatctaactgtttagttgtttatctaatacggtttgaacatatttgggtttatgcctgtttttgagatttttattattgtgttaataatattttttagcccgataagcagctgcttgccctctattttctttagttatcgccccgcgtttggccagcacggacaggccagggccagcatctgctcacctaacaaaatgagaattgttattgatatcacgctttcgcccactacaatgcccgccagtgcatgatttttgaatagggtttctgatggagttgttacgggtggtgttccagcagtatcgctggccgtttctggcggtaatggcgttaaccatggccagtgcggcgttggggattggcatcattgcatttattaacgtgcaattgatgggcgcggcgggtaacccgctagtggtgttgccgcagtttctcggcctgttggccctgttgatggcggttacgctcggctctcagttggcgttgaccacgttggggcactattttgtttaccggctgcgtggtcaactggtgaagcgcatattggatacccatattgaacggttggagcagttgggcagtgcctcactgctggctagcctgtcgagcgatattcgcaacatcaccattgcttttgtccgcctaccggagttggttcagggggtgatcctgaccctgggatcggctgcctatctgggctggttgtcgcctgccatgctgggcgtgaccgcgatatgggtgacgatcaccattttgggcagttggtatctggtctcgcgggtttatagccacctgagcagcgtgcgtgaagcggaagagcggctctatctgcattatcaagcggcgatcgacgggcgcaaagaattggcgctgaaccgcgatcgggcaaaaatgctattccagcaggcttaccagcccgatgccggtgactaccgttaccatattatccgtgcagatactttccacctcagcgccgtaaactggtcaaatatcatgatgctgggcgccatcggcctggtgttctatatggcaaacagcctgggttgggcgaacaccacggtggcggcgacctactccctgaccttattgttcctgcgtacccccttattacaggcggttggggcattcccaacgctgattgcggccgaagtggccttcaataaagtgaaggcgctcaaactggcggactatgatccggcatttccggctccacaggctcgcgcgtggcaaacgctggaactgcgcgacgtggcattccactatgcggcgggtgaacagcaatcagggtttgcggttgggccgatcaatttgacgttacggcggggcgaactggtgttcctgattggcggcaacggtagcggtaaatcgacgctggccatgctgctcactgggctgtatgtgcccgttagtgggcagatcctgctggatggtcaaccgattacggttgccgatcgtgaagattattgccgcctgttctctgccatctttacggatttccaccagtttcaccatctgttggggccgcaaggagaacaaccggacgccgaactggtggaaacctggttgcagcgcctgaagatgaaaagcaaattggagttcgacggtacgcgcgtcactaatccacaactgtcgcaagggcagcgcaagcgcctggccctgttgttagcggtggctgaaaagcgggatattttactgctggatgagtgggcggcggatcaggatcctcagttccgccgtactttctaccgcgagttactgccgcaactgcgcgaaatgggaaaaaccgtgtttgctatcagccatgacgaccattactttgaacatgctgatcgcctgctgcaaatgcgagatgggcatctgagcgaactgattggggatgatcgccatcaggcgagccgggactcagttagccagcttgattgaattgctgaatttgtcggggcgctaatattcgccccgacatgacgagtcggttgaggaatatctgtcgtcccataggcctaggcttgtggagtgattgtttataccgataatcaaaatcgccgccaatgatttactctgtgtctaggggaaaacggtacatggcattgcgctcgtggtaccgatttcaattggcaacagggtagccaggggagcaggaacgcgccgatggacaatcaatcactcattcccaccacagaggttccactagcggaaacgctaagatttccgccatcctggcaactcaatgagcggcaacagcgctttatcgaggatctttggctgggagaagatcatgccatgcctggttcagacgataatcttgcgacgcccggccaagatgccgaacagcatctgtagcagcgttaaccctagcaaaatcgtcaacggcaccgtccagccttgggtcaaatcatgcaccaggccaaacaaggtcggccccagcgcggccagcagatagccgatggattgcgccatccctgacagcaccgttgcctgatgatggtgctggctgcgcaagccaaagaaggacagcgccagcaccagtgaactccccgcccctagcccggcaaatatcagccagataagcgagtgggcaggcagcaacagcaatccgccgacgccaataaagatcaaaagcgaactgaccagtgcgatcccccgctggtcgcgtgcgcgtggcagtgcgaacaccatcacaaagttggcggcgatcgccacgatctgataaacaaacagctcgaaccccgcctgctgcggtgaggtgccgtggctggcggcaaaggcgctgaaccaaccgataatggtgtagaaggtgatggattgcagccccatgaacagggccacctgccaacccagggcgctgctccagggagagcgaaaggtttctgcagccaccggcgtgccggttcgggtaaccgggatgggtttgcgcttcagttggggtagccagatcgccagcgcgataaacgccggcaggctccagcacagtagtaaaaacccccagccgttatcgttgaatgccgctaacggcaccgccatgccggaggcgatagcggccaccagtgacatcacggccgcataggtactgattatcaccgcagcccgatgaggaaaatcgcgttttaccagtgttggtagcaccacgttggcaaaggcgatggcagcgccgatcaacaccgttcccaaccacagcatgccatcccacggttgtgaacgtagcacgatcccggcgaccagcagcattagcgccagcccgagtgtgcgttcaatcccaatgtgtttggccagcgacggcgttaatggcgataacaccgcaaacaggatcagcggcagggaattgagtaacccggcggcggtggcagaaagcatcagttggtgctggatctgttccagtaacgggcctacgctggttaaaggggcgcgcaggttagctgccaccagcatgatgccggccagcaataagaaacgcgtcaaacggctgcgtttaacaacacaatgtgcggatggttcgggttggggcatgggatcctcgcatcaggcatgcagccaatcattactgcatgacgagatgcgttgattgacgttaacgcttacgtactggcagggctgccggtatctacgcgccagtttaggaaagatcgcctcgcctgacaagaggttaaggaaaccgcacttggcaccctccaggtggctttgatcaacgcgagggaaattattgctggcagcattgcccgccataacggatagtaacggcagtaaacttattgtgaggaatcgctatgtcttctttctacagcccccgccgtatcgtgctttacaccatcgccgtgatcgtgattttggtgattgtcggtctggtgactcacctgggtgtcggttggctaaactgaaccaattaacagttttgtgaagttgatcacctaaggaaagaaaagccttttcgctgctgcccgccaaagccgctttcactgtgctatttttcacatactcttaacctgccgccctatcggcctgcggcagatttcacttttctcgcgcccgccgagaaaatagtttcatttcatttcgatccgaaagctttttacccccatttgctgctaaaactgccctgtaaccccgatcacaatttcattgctttcgctttgttgtaataccgccgcagtagagcgaaagccatcatctcccggccataaccggaaacctgaggacctattgctcatgccagtgaacaccgctaaacgacgtgaacacattatcgatctgctctgcgagcacggaagcgtgcgggtggaacagctcagcaaacagtttgccgtttccacggtgacgatccgcaacgatctgcgctttctggaacgcaaaggctgtgcgctgcgtgcctatggtggggcgatgctcaaccagcagtttgccttcgatcgcccattacacgacaaggggcgcttgaaccgagatgtgaaatcacagattgcctgccgagcggcaagctacgtgcgggacggtgatgcgctgatcctggactccggttccaccacggcccagatcgtgccctggttgaaaccgcgccgcgatctggtggtgatgaccaatgcgctgaacattgcctatgagctttcaggctacgacggggtggaagtgatggtgttggggggaagcgtccggcagaactcctattcgctctatggcccggctgccgagcagcaattgcgccagtaccgcttcgacaaactgtttctgggcgtcgacggtttcgatctggttgcggggatcactacgcctcaccccggtgaggcacacctcaatcgtgtgatgtgcgaggtggcgcgcgaaattatcgcggtagcggatgccagcaagtttggtcgcaagagcttttgcatgatccgcgaagtcgggcaaattcatcggctgatcacagatagccgtcttccacaagattatcagcaggcgctcagcgatttaggcgtagatgtggtgatagccgatcgcgaatagggtgccatcatgggggattcatgcagcagtggttacaactggtagcacagcacaaggccggccagccggtggggatattttccgtttgctccgcgcatccttgggtattgcaggccgccttgcggcaagcaaaggcacgtggcacgccggtattgatcgaggcgacgtcaaaccaggttaaccagtttggcggctacaccggccagaccgccgcacagtttcgtgatgcgctgtggcagatggcggatgacatcgggttgccaagaagcgctatttggctggggggcgatcatcttggccctaacgcttggcaagaccgcccggcacaagaggcgatggcgctgtccgaaaccctgattgacgactatgtgcgcgccggatttcgcaaaatccatctcgactgctccatgtcctgcgctgacgatcccaccccgttgggagatgaagtggtggcgcagcgtgcggctcgcctgtgcgcagtggcggaacgagcctggcagcaagcgggtggtgaagctccggtgtatgtgatcggaaccgaagtgccagtgccgggcggtgcgcaggaaacgctgcaaggcatccaggtgactacgccacaggccgtctccgtcacgttagaggcgcaccgtcatgcctggcagcaggcagaactgagcagcgcatggtcacgagtgatcgccttggtggtgcaacccggcgtcgagttcgaccatcacagcgtcgagcattaccaaccgcaggcggcgcaggcgttgagccgctttatcgaacgccaaccggggttgctgtatgaggcccactcgaccgactaccaggcaccgaaggcttattcgcagctggtgcgtgaccatttcgccattctgaaagttggcccggcgctcacttttgcgctgcgtgaggcgctgtttgccctcgatcgtatcgaacgtgaatggttaggggagcatcgttcggcccagctgtgcgccacgcttgaacaggtgatgcgcgaacagccgcagcagtggagccgctattatcacggcagcccgcatcaacagtatctggatcggcactacagcctgagcgatcgtgtgcgctattactggccgcagccacaggtccagcaggccgtggatgcgttgatggacaatctacggagtaacccaatcccgctggccttactcagccagtatttacccgatcaggcacgggccttgaatgccggtgagctgagtcaggatccgcaagattgggtgatccacaaaattacccaggtgctcgacgactaccactcagcctgttacccggaggtgcgctgatatgcccaatattctgatgactcgtatcgataaccgcctggtgcatggccaggtaggggtgacctggaccaacacgctgggcgccaatctggtggtggtggccaacgatgatgccgccgccgatccggtacagcaaaacctgatggacatggtggtggcggaaggcgtgcagactcggtacttcaccctgcaaaaaaccatcgacgtgatccataaggcggcggatcggcaaaagatttttctggtgtgcaaaacgccgcaggacgtattgaaactggtgcagggcggagtgcccatcacttttgtcaacgttggcaatatgcacttcgccgcaggaaaacggcaaatccacaaaacggtctcggtggatgacgatgatattgccgcctttcgtgagctggcggcgttgggcgtagcctgcgaggtgcgccgagtgccggatgaagccggtgaagcgataggcaaactgctcgcttgagcgcagggggaagcatgttaactgacgcgttattgattgcattactcgcggggctggccggagtcgacctgtttgacggcctgacccacttccaccgcccggtagtgatgggaccgctggttggcctgatcctgggggatgtcactaccggcttgctggtaggcgggacgttggaactagtgtggatgggcatggtgccattggccggtgcgcagccgcctaacgtggtgatcggcggggtggtcggcacggcgtttgccatcctcaccaaggccgatcccaaggtggccattggcgtggcggtgccgttcgccattgcggtacagggctgcatcacgctgctgttcaccgcgttttcacccatgatgcaccgctgcgatcgcatggtgcaggaactgaactggcgtggcgttgagcgagtgaactacctcggcatcagtatcctgtttgttttctattttgtggtggcgtttttgccgatttacttcggtgccgatgcggccagcgccatggtgcagaaagcgccgacctggctgctggatgggctggcggtggcgggcggtatgatgccggcgatcggcttctcactgctgatgaaagtgatgatgaagaaaacctacgtggcgtatttcatcctcggctttatttcggtgactttccttaagctgccgatcttggcggtggcactgggggcattggcgatcgcgctgatcgatttctttaacagtcaacgggcagatgcggatgtgaccaggaagcctgttcaaccggaggacgctgaagatggcatttaatgactctgacgatctgctggcgcaaaaagcagcaaaacgcctggaacaggcattggccaccagccaggtagagcaggacgactacgttgatagccgcccggcagaggcgctgacgcgcagtgatatcaaccgtatggcctggcgttcgttgttactgcaggcatcattcaactatgaacgtatgcaggccggtggctggctgtacaccttgatcccgggtttgcgcaagatccaccgcaatcctcaggatctggcgaattcgatgaagatgcatatggagtttatcaacgtgcatcctttcgacgttaccttcctttcggggttggtgctggcgatggagcaaaacaaggagaaagtctccaccattcgagcggtgaaagtggcgctgatggggccgttgggaggcattggtgatgcgctgttctggctgacgctgttgccgatttgtgcgggcatcggggcctctttagcgctggaaggcagcctgtttgggccgatagtgttcctgctgttgttcaacgtgttccacttcgggctgcgctttgggctggcgcactatggctatcaggcgggcaccagtgcgctgacgctgttgaaaacccataccaaacgaatatcccatgcggcgtcgatcgtgggcatgacggtcatcggtgcgctggtggcctcctatgtacatctttccacgccgctgatcatgcatgccggtaaggccaccgtggcgttgcaaacggatgtgctcgataagttgatgcctaacctgttgccgctgtgtttcacgctgctggtgttcttcctgatgaagcgcggtttctcaccggtgaaactgatcggtgtgacggtggtgatcggcgtagtgggtaaatttttcggtttgctgtgaggaagtgaacatgccaggaattgtcattaccggccacggcggcttcgccagtggcctgctgcaggcggtagaacaggtggtaggagaacagcctgcctgtatcgcggtggacttccctgtccatatggggacggcggagctgaaagtggagttgagtgccgcgctgcaagcggtagagcaagcggacggcgtggtgttccttaccgatatgttggggggatcgcctttccgtagtgcctgcgagttggccgatgcgcatggcaactgtgaggtgctgaccggggttaatatgcagttggctgccgaaatgatgctggagcgtgaagggctgagcctgaccgagttccgtgacatggcgctggcctgcggcaaacgtggcttgaccagcctgtggcatgaacggcgtaaggtgaaatgcgccaacgccgaggctgatgggatttaatcaggtgccctctcactccaacccttccaaaggggggagtgagaggagctattgaggctaactcggcatcggcaacgggctaagcgccatctgggccgggccattttcattacggctgaaacgccagcaggtctgatgatatttcgccacgctgttgcggtgtgccacgctgaccagcgtgacctccggcagttcgtcaaccagcaggcaatacatcaattgctcggtttcatcatccaacgcgctggtggcctcatccaggaacagtacatccgggcgggtaaggatcgcacgggcaaacgccaatcgctgctgctcgcccggtgaaaggcgatggctccagttggcgctggtatccagccagcgttgcaggtgtttcagccggcagttttccaggactttcaacagctgctcatcgctgtagtctttatcctgatgcggatagctcagcgcttcacgcagcgtaccgatcgggatatagctgcgctgcggtaggaacagcgtcgtgaggtgattatccaggccgatttcaccggagccgtaaggccagatcccggcaatggcacgcagcagcgttgatttaccacagccagaagggccaacgaccagcacgcgctcgccgcgtttcagcgtcatggttgctgcacttaacagaggctgtccatcgggcagcgtaaggccaacatcgcgcagcatcagcggtgagtggtcttcctgttgcaggctgataccgcggctctggttatgcacctcgtccaccgccgcgttaaagccagccagacggttaacgcaggctttccaggtggccagatcggtaaacgcgtcgataaaccacgacagcgacccttgcacctggccgaatgcggaggagatttgcatcagtccgcccatttggatcgcacctgagaaatagcgtggcgccgccaccagcagcggaaagacaatggcaaactggctgtagaaattactggcgatattcagccgccgggtgatacgcatgatcgaccaccagttactgcggatggcctcaaagcggttacttagctgctgtttctctcgtggttcaccgtgatacagcgcgatggcatcgttattttcacgaatacggatcagcccgaaacggaagttcgcctcataacgttcctgattaaagccgagcataaccaggggcttgccgacccaccagatcagtaaggatcccagtaccgcgtacaacagggcaaaccacaccatatagcctggtagggtaatggcatgctgggcgatcacgaaggtcatcggcccgctgatatgccagagaatggtaataaacgaacagagtgtcaccaggctggagagcaggccgagcgacaaagataaggtgtactgggtcaggacgttgagatcgtcagagatacgctgatcggggttatcgataatctgctgttgttcggtatggtaataggcctggtgcgctagccacttgcccataaatttttccgtcatccagcgccgccagcgcatctgtaggccctgggtcaggtagattttgtagaccgccagcacgatgaaagataatgccagataggtaaagcgccacagctgggctttgaacaccgggtagtttttattctgcagggcatcgtagaacacctggttccactggttgatcagcacgctgatataaaccagccccagggataggcccacgatggcgatcagcatcgcccaggcgcgccatttttcttccgaaacccaaaagggtttgatcaactgccagacggcttgtttttgtgtggtgctcgtgttcataaaaatccagaaggtatcgttttcttctagcatgggcacgaggttggtaacaaacaaaccgccacatgtaagcagttttgacgtggctcattatttgcaatacagcagagataaaacgagcgctagtaacgttgattagcgtaaggcgaaggcgtctttggcgcggcggcaaatcacaacacaaaatgaaattgttacaactatgttcggggcgaacatgtgctcgccccggcagatttattttacggcatctttcagtaatgctttccagccttcaacatttcccaaatactcctgcacggggatctgggatagccgcccttgattatcttccagggcaaaggttgggaagccatgcccacggactttggcgagcagtgcgcggctgtcggcgatatgctgtgccgttggcgcgccgctgttcaaacgcatctcggcaataaaggcagcaggatccaggcccaactctttcgccagcgcttccaacactggcgcatcggcaatacgtcgcccttcccggtagtgggcttcctgaatacggtgcagcatatccaggccccgtccggcgagctgttcagcggccaggatcgcaacgatcggtggttcagagtccatcaccgccgtggtgtctcgcagcagtccgttgaagtaaccgtcgccgaaaggctggccggttagcccggcaatccgcttatcatgcggcatcacgtaattacgccattcctcgttgatggttcggcgggcattgccggtcatcatgccaccggcgtgcagggcaacggtcaggtctggaatagcctgcgcggccttggccagcggtgctgcaccgtaacaccagccgcacagcggatcgaaaatgtaatgcagggtcgtcatgtttttgctcctagcgctttactgtggccacttcatttcgcctttcagtaccttggcgctcagttccaggctagaaccatcttgcagttttggatagtgctgctgcatggccgcgatcagttcagcggagttcttggtttttggcaactcactttccagcgtggtcaggtaattgtgggtaaaggtcaccgactccagcgtttgtgccgctcctggcaggaagtgccctggaactactaccagcggtttcagcgccttgatgctttccagcgtttgctgccaatgagcgcgtgactcgacggtctgattatccgcaatccacggatgaatattgtcaccggccaccggtacgccacccaccacagctttcaacgacgggatccacacaaaggtgcgatccggcgttgggccattgaggcctttcacttcgacctgctggccatcgatgctaaagctgctgccttgcaacggctgcggcacgatcacggttttcggcgcattctccttcaggatcggcccccaataggcgagtttacctgcctgggttgcattgatcgctttgatcgtttccggtgaagcaatgatatttgcctccgggaaggcggctttgatcacatccaggccgaaatagaaatccggatccgaatggctgatatagaccgtggtcagctttttaccggtagccttaatctttttcaccagctcctgcgcgtcgttacgctggaattgggcatcgatcagcgccacttcatgtgggccgctgacaatctcggaagagaccgggaaaacgctcttttcgcctgggttgtacacttccagggtcagagtattagccgcagtggcgaaggtgctgagtgaaacgaagccggttgcggccagagtcagtaatgatttcttaaacatgtgcaggtgccttttgggtgtttgttatcgttggtcagatgataggttgcatagaacgggagaaaaaccggataataagcaattattcattgcgtaaatcgagcgaatcatggatcgcattaccgccgcagaggtttttgtcactatcgtcgaacgcggcagcatgattgcggcagcagataccctggcaatgtcgcgagctatggtgacgcgctatctggcgcagatggaacaatgggccggggcgcgactgttgcaccgtactacgcgtaggctcagcctgaccgatgccggagagcgcaccttggaacgttgccgccaaatgctggcggtagcgaaagatatcgatctggtggaaaacgagcagagtgacgatttacgtggcctgctacgaatcacctgttcgcaatcgcttggccaaacggcgctggtgggggcggtggcgcagtacctgaagcgtcatcctcaggtggcggtggatctgcaaatgaataaccgagcggtcaatctggtggaagaacggatcgatctggcactacgcatcaccaatgaactggatcccaatctgattgcccggccactttccaactgcgcttcggtgatctgtgcgtctccagcctatctggccgctcatggtaccccgcgtcacccgcaagatttagccctgcacaactgcctcacctattcctactttggtaaaagcctgtggcactttgatgagcaaggcgtgaagtcggcggtggcggtcagtggcaacctcagtgccaacgaatcggtggtgctgttggcaggaacgctgcaaggggcgggaatttccatgcagccctactattccgctgcgccactgttggcaaagggggagttagtggaactgttaccggggtatttgtcacagacgatggggatctacggtatctacacctcgcgccgccaaatgcccgccacgttgcgtaccatgctggatttcctggtggaatggtttgccaccgatcctggctggcgtgccacgctgcgctagcgttggatcaccgaagccaggcgggcgggcaactgttgcgcctgctgctgcaagtgctgcacaaaggcggtgaccagcgcggaagaggggcggtgcagcgggcggatcaggctcacggtaaacggtacctcgacgctgaagggccgcacatgaacaccattattggcgtaatccaacgcggtcagtgggttgacgatcgagatgccgactccagccttgaccatcgcacagaccgaagcggcgctgtgggtctccatcaccatccggcgctcgatgccttgttcatggaacagcgcatccagcagttgtcgatagctgtcggtgttcgacaggctgataaagttttctgcgttgaagtcctgcggcgtcagcgtgcttttcgcaagcaatgggtgcccggcaggcagcacacacacctcattcatcgtcatcagcgtcatgcgctcggtgccagcgggcgtcagggtattctccgtcaggcccagatcgtggcgctgtgccgaaagccactcttccagcaacggtgactcctgcgggatcacgctgaagctcacttccggataacgatcaacaaaaggtttgcacacggcaggcagcagcgattgggaaaacaccggcagacaggcaatggaaagctgcgcctgctggaattgccgaataccggcggctgcattcttgatgcgatccaggccgtaataagagcgctgcacttcttcaaacagccgcaagccttgcaccgtcgggtaaaggcggccacgtacgcggtcaaacagttgcaattggattaacttctcgaagcgggcaagctcgcggctgacggtcggttgtgaggtttgcagcagcgccgccgcttcggtcagattgccggtggtcatcaccgcgtggaaaatctcaatctggcgcagggtaatggcatacatggcgaaactccacggagagggaaagccatatcataaatgaatagactatggcgaaatagatatttttcacaccggggccgctgcggcatgatggtggaaaatttgattatgggaaccgaaccatgccacgctccttgaacgacacctctaccgccctgaacgccgccaatctgctggcgctgccccaacgctttggttgcccggtctgggcctatgatgcggctatcatcagcgagcgtatcagccagttgcagcactttgacgtgatccgttttgctcagaaagcctgctcgaatattcatattctgcgcctgatgcgcgagcagggcgtcaaggtggattcggtgtcgctgggggaaatcgagcgtgcgttaaaagccggttttgagccgggtggcgaagatatcgtgtttaccgccgatgtgctggatcacaccactctggcgcgcgtcagtgaattgaaaatcccggtcaacgccggttctatcgatatgctggaacagcttggacaagtgtctgccgggcatccggtatggctgcggatcaaccctggttttggccacggccatagccagaaaaccaataccggcggtgaaaacagcaagcacggtatctggtatgccgatctgccgcaggcggtcgccaaggtgcagcaatatggcctgaaactgatcgggctgcatatgcacatcggttccggggtggattaccagcacctggagcgcgtgtgtgatgcgatggtgcagcaggtgattgccctggggcaggacattacggctatttccgccggtggcggcctttctatcccttatcagcaaggggaggaggcgatcaataccgaacactattacggcctgtggaaccgtgcacgtgagcgagttgccgcacatctgggccatccggtgaagttggaaatcgagccggggcgtttcctgatggccgaagcaggcgtgctggtggccgaagtgcgttcggtaaaacagatgggcagccgccactttgtcctggtggacgctgggtttaacgatttgatgcgtccggcgatgtatggcagctatcaccatatttccctactgcccgccgacggccgcaatactgataaccaaccattgcaagacaccgtgatcgccgggccactgtgtgagtcaggtgatgtgtttacccagcaagcggggggcggtattgaaacccgtccgttgccgcaggtgcgggtcggtgattatctggtattccatgacaccggggcctatggctcctcgatgtcctccaactacaacagccgcccgttgctgccggaagtgctgtttgaaaacggtgagcctcggctgatccgtcgccgccagacgattgaagaattgatcgggctggagttaatttaagcgtaggggccaggtaccacggactcacgcagttttaactcaccgacaaacggcgttagcggttgcagcgcttcgccgttgatcagacgcagggcctgggcgatcgccgcttcgatcatcgcgtcgatcggcaggtagacggtggataacgccggttgcagataggcggcgcttggctcatcgtcgaaaccaaacagtgaaacgtcctcaggcaggcgtttgccagcctggtgcagggccttcatcgcgccgatggccatatcatcgttgctggcaaacagcgcgctgaatgtgttgccgctagccagcagggccttacagctaaggtatccgccaggtacgctactatcaccgttggtgatcagggcatcattgaatgctatctgatggtgttccaacgcctgacggtaacccgccaagcgggattgggcagtgggtgtatcaattggcccggtgatgcaggcgatctcacggtgcccttgaccgatcagataatccaccacgttgaaggcggcctgttgctgttcgaagaacacgcagcgttcacgagcctgcggcagatcgcggttaatgaccatcaccggaaccggcaggtcttccatcaactccatcagggcactttcgcccataaagcgggtgtacaggataatcgcgtcgcaacggcgatccgccagcagccgtaccgcctgcaattcatcttctggcgtgtcgtggccgtcggtgacgatcaggtgcttgccgctggcctcgaccagtttggcggcctggcgcagcaaacggccaaagtaggggccgtcaaaattggatactaccagcccaatgctgttggagcttttattggccagcgattgggcgagaaagtttggccggtagcccaactcatccattgccttgaacaccgcatcacgcgtgctcttcttcacctggccggtgccatttaaaacgcgggaaaccgtggctttggatacccccgcacgcatggaaacatccaacatggtgatcatcaatggctaccctctttcaacgtccgctgcggtaaatattgctgagtctagcatagggttagatcgcgtcgaacatgttcgactcctacaaattcagcaacatatgttgttggggcagccatgcattgattcgcgtacactgacggtgctggcgtttaaggcatttttcagaggggattagcgtgtttcgtatcgtgcatctggcggactatccgcagcatcagcaacaggttatcgactggcagtggcaggcgtttggctgcgaaaacagccggggattttttgccagcgtggtggccagcagcctgcggcatgaaggtttgcccatcacctttattgccctgtgggatgacaagccggtaggcaccgtggggctgtggcgctgtgatttgatcagccgccaggatttaacgccgtggctggccgcgctttacgttgaggagagccagcgcggcagcgggctgggtttgcaactccagcaatatgtgcaggaatacagccgccgggccgggttcaaggagctgtatctgtatgccgagtttagcggttattacgaacgccatggctggcagcacatcggcgaggcgctggagtacccggatcgcctcgtgcgcctataccaccgccagctagtttagttctgttcgaaggcgttattgatgctggcgaccgaatggcggcgtaccagcgtcgggctgaacatattggtgatctccggtagcggctggttgttggccaacgctaatgccagctctgctgcttgcgtcgccatcgccactaccgggtagcggatagtggtcaggcgtgggcgcagatagcgcgaaatcagcacgtcgtcaaaaccaatcagcgaaatctggcctggaacgtccacgctgttatcactgagtaccgaaagcgccccggcagccatcggatcgttatagcaggtgatggcggtgaactgcttaccacggcccagcagctcggtcatggcctgctcgccaccaatctcatccggcttgccgtaggcaaccagcttctcatccaccgcaataccgtgttcttccaatgcgtccaggtagccctgcaatcgatcggtagcatctgaaatctgatggttggagcagataaaggcgatccgctggtggccctgctggatcagatggcgggtggccagccaggcaccgtagcgatcgtcaagcgctacgcagcggggctcaaagccaggcagcgtacggttgatcagcaccatacctgggatctggcgcatccagacggtcagctcatcgtcggtcagcttcttggcgtgcaccaccaatgctgcacagcgatggcgcaccagttgctcaatggcctggcgctctttttcggcattgtggtaaccgttaccaatcagcagaaaattatgcgtggcgtaggccacctgctccacggcttttaccatggcaccaaagaagggatcggaaacgtcagagacaatcaggcccagggtttcggtggattgctgtgccagcgcacgggcattggcgttggggtgatactgcaatccttccatggcggccagcacggcggtccgtgaactttcgctggctttcggggaattatttattacgcgggacaccgtggcgacggaaacacccgccagcctggcaacatccttaatcgtggccatatctgcaacacttcctgggtaatcgcttacattcctcagttttgcggaaaaaatcgcgcgccgcaagggctggtatcgttaacttgtggtgagtgttgcatttatggtttttaaatccaccttttcgcccgaagcggatccagggttaacgggcacagcatgcaggctcctgcgatccggagcgactgaggttttgcaatagtttcaaaaccatgtctatcaaaggaaaaactacatcgctggttacactttgcgcctgactgttgcgattggccgctggtgagagtttggcgtggcggggtaaattgaatgtcccagaggtattgattggtgagcaatcggcatactctgtatgttgaagccattttcaattgcaccaacctacgcggatgcgtaggtttttttttgcctgccgtatagtattcttccctcagacaatttttaaggccatcaaccccgagggagagtgggatgatatataccgtgttacgtgcactgtttcgcctgatgtttcgtgttcgtgtcgaaggcgatgccaggcattttgagcagcagaaactgctgatcaccccgaatcacgtttctttcatggatggcgcgctgctggcgttgttcttaccgatcaaaccggtgtttgccgtttactccagcatttcggaacgttggtttatgcgctggctgaagccttatatcgactttgtgccactggatcccaccaaaccgatggccatcaagcatctggtgcgtatggttgagcagggcaggccgatcgtggtgttcccggaagggcgcattacggtgaccggctcattgatgaagatctacgacggggcggcctttatcgccgccaaatctggtgccaccatcgtgccggtacgtatcgatggcccggagttcagcgtgtttggccgtatggccggggtgtataaactccgcgccttcccacagaccaccatcagcattctgccgccaaccactttacctatgccagatgcgccaaaagccagtcaacgccggcaattggccggtgacaggctgcatcagatcatgatgcaggcgcgcatggataccctcaaaccgcaaaccttgttcggcgcgctgttggccgcgcagcatcgttatggccgcttcaagccctgcatcgaagacgtgggcttcaaggaagacagctatcatacgctgctcaaaaaatcgctgggcgtcagccgcatcctggaacgttttaccgcgccgaaagagcatgttggcctactgttgcccaatgccactattaccgctgccgccatctttggcgcttcattgcggggccgtattccggccatgctcaattacaccgccggcgtgaacgggctgaaaagcgcgatgaccgcggccaccattaaaaccatcgtcacctcgcgccagttcctggaaaagggcaaactgacacacctgccagagcaggtgccggaagccaactgggtctatctggaagatttgaaagataccgtcacccgcgacgataagctgtggatcctgcgtcacctgttccagccacaaaaggcaatggtgccacagcagccagaagatgcagcgctgatcttgtttacctccggctcggaaggccatccgaagggcgtggtgcattcccatgccagcctgctggccaacgtagagcagatccgaaccattgcggatttcaccccgcgcgatcgctttatgtcctcgctgccgctgttccactctttcggcctgactgtcgggttgatcaccccgttgatgaccggtagccgagtattcctttacccaagcccgctgcattatcgcgtggtgccggaactggtctatgaccgcaactgcaccgtgctgtttggtacggcgaccttcctcaacaactacgcccgcttcgcccatccttacgattttgcccgcctgcgctatgtggtggccggtgccgagaagctggccgaaagcaccaaacagatttatcaggacaaatacggcatccgtattttagaaggctacggtgtgacggagtgtgctccggtagtgtcgatcaacgtgcctctggcggccaaagttggcaccgtaggccgcattatgccgcagatggaagcacgtttgatcaagatggctgggatcgataacggtggccgtctgcaattgaaaggcccgaacatcatgaagggctacctgcgggttgagcgcccaggagaactggaagctccggcagccgaggacgaaaacggcgtgctgcaagccggctggtacgataccggtgatattgtcagcttcgacgaacagggttattgcactattcgtggccgcgtgaagcgctttgccaaactggcgggggaaatgatctcgctggagagcgtggaacagttggcagtgcgcctgtcaccggaagggctgcatgcggccacggtgaaaagcgacagcagcaaaggtgaagcgctggtgttgttcaccaacgacgccagcattacccgtgatagcttgctgcgggtggctcgtgagcagggtaccccggagttggcggtgccacgtgatattcgcctggtgaaggcgttgccgttactgggcagcggcaaaccggatttcgttactttgcgccaaatggctgaacagccggagaaggcataatgaatgcaactgattccccactgctgtcacgttcaatgatcgcggtgatctgtgcccagtttctctcggccttcggcgataacgccttgctgtttgcgaccctggcgctgatcaaacagcaaatgtaccccgattggagccaaccgatactgcaaatggccttcgtggccacctatatcatcctggctccgtttgtgggccaaatcgccgacagcttctccaaaggccgggtgatgatggtcgccaacggcttaaagctggccggtgcgctggtgatctgctttgggctgaacccgttcctgggctataccctggtcggcatcggggcggcggcttattcaccagcgaagtacggcatcctgggtgagatcaccagcggcgataagctggtgaaggccaacggtctgatggaggcttccaccattgctgccatcctggtggggtcggtagccggtggcctgctggcagactggcatatcgtggccgcactggcggtgtgtgccgtggtttacggcgcggcagtcgtcgctaacctctatattccgcgcttgcctgctgcctacaaggtggcctcctggcacccacgcgtcatggggagcactttcttcaacgcttgcgtggtgctgtggcgcgatggccaaacccgtttctcactgattggtaccagcctgttctggggcgctggtgtcaccctgcgcttcctgctggtgttgtgggtaccggtagcgctgggcattagcgataacgccacgccaaccatgctcaacgcgatggtggcaataggtattgtagtcggagccggggcggcagcccgctttgtgacgctggaaacggttaagcgctgtatgcctgccgggatcctgatcggcatcgccgtggccttcttcgccgtgcaaaccagcatgctgaatgcttatggcgtactgctggtgattggtgtgctggggggcttctttgtggtgccgctgaatgcgctgttgcaagagcggggcaaacgctcagttggggcggggaatgccatcgcggtacagaacctgggtgaaaacaccgccatgctgctgatgcttggcctctactctttggtggtcaaattaggcgtgccggtgatcggcgtcgggatcggttttggcgtcgtgttcggccttgccatcaccgtactgtggatatctcaattccgctcgaaagcctaacaatagtcccctcaccccaacccttatgt

SEQ ID NO: 345 - DNA, 5711 bp, unknown
  Altogen  635822 strain
tgtaaatctcatccctgtgccttctgcgcgatgataaaatgaagagccaccttttgatgtgccaaggccccgttcctgctcgattgaaaacaacgcaataccctgatatttaaaaatcatgaagcgacttcaatttctttgccaagcatcaggttagctttacaaagctatcaagcctggccgacgaagaaaaccattaagcactatttttttgtcctttatcaggacaggcttttttattatgcatatagtcagacaatactgaaccatacattcatatgatatatgaaaaaacgtggagcgatgcatgcgagtattattattggaacaagatggcgaaaaaaccctggcacaagtcaagaatattgatagtaagcagttgccagaaggggatgtgacggtcgacgtcaactggtccagtctcaactataaggatgccctggcgatcaccggcacggggaaaattattcgtcacttcccaatggtgccaggtatcgattttgccggtctggtacacagcagcacagacccacgttttaaaccaggccagagcgtagtgctcaccggttggggcgttggcgaaagtcactggggcgggttgggcgaacaggcccgcgttagcggcgaatggctggtcccgctgccacaagggctgtgtgaacgcaaagcgatgatcctcggcactgccggctttaccgccatgctgtgcgtgatggcactggaagaaggtggagtgaaaccggaggacggcgacgttctggtcaccggagccagcggtggcgtaggtagcacggcggtcgccttactgtccgcactgggctatagcgtcaccgccatcagcggacgcgacagcaataccgactatctgaaatccctcggtgccaaaaccgtcctgccccgtagcgagtatattgaaacaccgcgcccgctggagaaacagctatgggctggcgccatcgacaccgtcggtgacaaattgctggctcgcgtgctggcgcagatgaattacaacggcaccgttgccgcctgcggcctggcgggaggctacaagttgccgactaccgtgatgccgtttatcttgcgtaacgtgcgtctgcaaggcgttgattcggtgctcacgccgctgcatcgtcgccaaaccgcctgggaacgtctggccggtattctgccagaaagcttctatgaacaagccacacaggaaattcagttggaagacgtgcctgccgctgctaccgcgctgatgaacaatcagatcactggccgcaccctggtaaaaatccgcccgtaatctgttgggcgccgcatccggcgcctgcttattcaccacaagaaattacctctcgtttacctctctttacatccgccctctcgcagaaagttggctttcacgccatgcttacaccatcacttgcggagaaaaaagatgaaacaacagcgaaaactgaccgaagccgatgtcacgccggaaagcgtgttctatcagcggcgcaaggtactccaggcgttagggatcacggcagcctcgctggctttgcccacccaggcacaagccgacttgctgtcatggttcaaaggtaacgatcggcccccagccccgccgggtaaagcgttggacttcagcaagcccgaagcctggcaagccaaactggagcttacgcctgaagaaaaagtctcgggttacaataacttctacgagtttggtctggacaaggccgatcccgccgccaacgcgggcgatctgaaaacgacggactggaaggtaaaaatcgacggcgaagtcggcaagcccataacgctggatatcgacgatttactcaagcgattcccgctggagcaacgcatttatcgcatgcgttgcgttgaagcctggtcgatggtggtgccgtggatcggttttgagctgggcaagctgcttaagctggccgagcccaacagcaacgcgcgctacgtagcttttcaaacgctgtacgatccagaacagatgcccggccagaaagatcgctttattgggggtggcctcaagtatccctatgtcgaaggtttgcgccttgatgaagccatgcacccactggctctgttgaccgtgggcgtgtatggcaagatgctgccaccgcaaaacggtgctccggtgcgtctgatcactccatggaagtatggcttcaagggcatcaagtccatcgtacaaatcaccctgacccgcgaacaaccgccaaccacctggaatctgtctgctcccaacgaatatggtttttacgccaacgtgaatccccatgtcgatcatccgcgctggtcgcaggccaccgagcgctttatcggttctggcggcattctggatgtgaaacgtcagccgacgttgttgttcaacggttatgccgatcaggtggcttcgctgtatcacggcctcgatttacgggagaacttctgagtgcgcttaacccccaagcagatcacctggctaaaagttgccatctacctggcagcattcctgccctttctgtggctggtgctgtccgtcgatcagggctggttcagtgccgatccggccaaagatatccagcattttaccggcaggatgacgctgaagttactgctggccaccctgctcgtcactccattggcccgctacgcgcgccagccgctgctgatccgttgccgacgtctgctgggtttgtggtgttttgcctggggaacgctgcatctggtaagctactcgacgctggaactggggctgagcaacataggcctgctggggcgcgaactggtaacccgcccctatctgacgctaggtatcctctgctggttgattttgttggccctggcggccacctcaacgctatgggcgcagcgtaaattgggggccaactggcagaagctgcataacttcgtctatctggtggcgatcctggcaccgatccactacctttggtcggtaaaaacgttgtcaccgcagccttttatttatgcctcgctggcgctgctgttgttagctctgcgttacaagaaattccgctcgtggtggcgtaaaccacgctaaaaccggcaagattgacggtaaaaatcccctaccggggcgcggaacttttctgtgttctacccctcataatccaatagcggcactgggtgtttgctgatttagggttgaatatcttcgctgataagaccagtatttagctgcgaattgccacgatatcgttataatgcccgaccttgaacctgtcgctgcagcaaaatctgcgcgtaacaggtgacaaatcggtgacatcgggttattttctacgatgatggttttattgccggagataccagcacaatggcggataagtttcacattttgcttctgaacggccccaatctcaatctgctggggacgcgtgagccggaaaagtacggcagcgctacgctggcagagattgttaacggattggaaaaccaggcgctcgcgctagatatcaccctgagccatctgcagtccaacgccgagcatgcgctcatcgatcgcattcatcaggcacgcggcaatacggattttatcctgattaacgccgccgcgttcacgcacaccagcgtggcgttgcgcgatgcactgttggcagtagagatcccgtttatcgagatccatctgtccaacgtgtacgctcgtgagcctttccgtcatcactcctacctgtctgatatcgcggtaggcgtgatctgtggcctcggcgcggatggctacacatttgctttacaggcagcggttcgccgtttgtcaaaaacccactaattgctacacaaaaagagtacggaatcacactcatggatattcgtaaaatcaagaaactgatcgaactggttgaagaatcaggcatttctgaactggaaatctctgaaggcgaagagtcggttcgcatcagccgtgccgcaccggtgcaggcttacccaatgatgcagcagtacgcaatgccagcccagcagcagcaacctgctctggccaccgccgttgcccctgctgccgcagaaaccccagcagcaccagcggccatgagtggccatatcgttcgttcaccaatggtagggaccttctaccgcaccccaagcccggacgcgaaagccttcgtggaagtgggccagaaagtgaacgccggtgatactctgtgcatcgttgaagccatgaaaatgatgaaccagattgaagcggacaaatccggtgtggttaaagcgatcctggtagaaaacggccaaccggttgaatttgacgagccactggtcgtcatcgaataacgaggcgcaccatgctagataaaattgttatcgccaaccgtggcgagattgcgctacgtatcctgcgcgcttgtaaagaactgggcatcaaaaccgttgccgttcactcaagtgccgaccgcgatctgaaacacgttctgctggcggatgagaccgtttgtatcggccctgccccgtcagttaaaagctatctgaacatcccggccatcatctccgccgccgaaattaccggcgccgtggcgatccacccgggttatggcttcttgtccgagaatgccgactttgccgagcaggtagagcgctctggctttatcttcatcggcccacgcgccgaaaccattcgcctgatgggtgacaaggtttcagccatcagcgcgatgaaaaaagccggcgtaccttgcgtaccaggctccgacggcccgctgaccgatgacatggacaaaaaccgtgccttcgccaagcgcatcggttatccggtgatcatcaaggcttccggcggcggcggcggtcgcggcatgcgcgttgtgcgcggcgacaaagatctcgaacaatccatctccatgaccaaagcggaagccaaagcggctttcaacaacgacatggtgtatatggagaagtacctggaaaaccctcgccacatcgaaattcaggtgttggcagacggccagggcaacgccatctatctggctgaacgtgactgctccatgcagcgccgccaccagaaagtggtcgaagaggcaccagcaccggggatcaccccagagctgcgccgctacatcggtgaacgctgttcaaaagcctgtgtggaaatcggctaccgcggtgcaggtacctttgagttcctgtatgagaacggcgagttctatttcattgaaatgaacacccgtatccaggtagaacatccggttaccgaaatgatcaccggcgtggatctgatcaaagagcagctgcgtatcgctgccggtcagccgctgtcgatcaaacaggacgaagtgaaggtgcaaggccatgcggtggaatgccgtatcaacgccgaagacccgaacaccttcctgccaagcccaggcaagatcacccgcttccacgctcctggtggtttcggcgtgcgttgggaatctcatatctacgctggctataccgtgccgccgtactatgactccatgattggcaagctgatcacctacggtgaaaaccgtgacgtggcgattgcccgcatgaagaacgccctggctgagctgatcatcgatggcatcaaaaccaacgttgaactgcagcagaagatcatgaccgacgaaaacttccagcatggtggcaccaacatccactatctggagaagaagctgggtctgcaggaaacctgattatcggttaacgatattgggctaataaaaaacaccgcatgagaacttctgcggtgtttttttatttaatggagagagggattttgcccc

SEQ ID NO: 346 - DNA, 457 bp, unknown
  Altogen  635822 strain
  misc_feature (90)..(179): n is a, c, g, or t
  misc_feature (321)..(371): n is a, c, g, or t
acgactgcactagcgacggctgtgcgagaactggggatgtctcctgccgccgcgctaactgatttgagggaaacagctggtgtaacgggnnnnnnnnnnnnnnnnnnnnnnnnnnnnnnnnnnnnnnnnnnnnnnnnnnnnnnnnnnnnnnnnnnnnnnnnnnnnnnnnnnnnnnnnnnaagcttactggggatagcaaaccaggtgggagtgatagtaactggttcctacgatggttcacaggcaagcgctgatacggttgctggccacctcatcgagtattcgcacgtcattgatgagtgggccgccaaggtcgctctnnnnnnnnnnnnnnnnnnnnnnnnnnnnnnnnnnnnnnnnnnnnnnnnnnnttgcgcgacatcgtgggcaatacgcccgtcggtcaggttacgcaggatattgtctaccgccagatccaactgatgaagtcgctacc

SEQ ID NO: 347 - DNA, 34316 bp, unknown
  Altogen  635822 strain
aaaactcagatccaaaatgcggctgagctccttggcatgttgtcgcttgccgatcccatgctgcaaaaagagttccctgaccttgcctgcaatcgactgcgaatcgaatttttgatgattgttaaacattttatccttcgatatatctcgctgatttttcagtcgctttgacacccatacgtacaaaaacgttatcgaaatctcgcatactatacaatcttagcctaatagcttgcttgacataccatcttttatggtcaaacatggtatcagaagtgatgtattataaaaacgatagtagaacgataagtcagtaataaccataccgacaccagggaaattataagccggccacaacacctgtttaaagtatcgacagggagttgcaagctgagcaagtttaaccgcagagttaattgcttcacccctcgttaagccggggcccgcaagggttccggttttttatttgcccaaaacccaatgaaaaggccggagaacactccccggcccgtcagcatggccaacctcgatcggcagattaccctccagcgttggcatcttcttcagcctggcgaatgatggctttagccatccactgggtcacatcctgaatatcatcgagctctaaaccccaaatgtccttcagcaccaggaacacctcggaaccataaatcagcgaaaaggcatggatcacgcgttgcagagcgtcagcagggagtttgttctgcaagggctccaccgccagcttcaacagccgcttgcgattgccacgcacaaacttttcgcccggcgtcgcgttagcccattgctggagcgaaagctgtaacgccgcacgtagcgcgccttcatgctgctccatctgcggataggcaaacgccaacagttgatgaatgcgcttgagcgcatcgttatcctgcggttgccattcaaggatcggccccaggcttttcgccacaacggcggagatcagggcactttgggtgggaaaatagcgataagcggtggcacgggagacctgcgcatgcgccgctagctctgtaatcgaagggaagacaccaccatcgtagagctccatcgcacaggccagcagcaagctgcgggttttggcacgagtatgtgtcaaagattcatcccgcggagcgggaaatgcggatattggcacgttttcctcgaacttcctcgtatcttccaaccttggagtcaatacgatagacagcctcaccgacagatcctggcccatcggcagcgtaaaaaatcatagctaagatagccaaaaacgggacacaagtctcactttaaacaaattaatgcttgcaaaaatgatacggcagtctcattatgaccaacaaataaacgatagtaccttattgtccgacaccagggttcacaacctacaataaaaaatagcattaaaatcaatttgttcagacttttgtctgaacctttttcaggaacagatgatgagcagcaccccaagttttgtctatattgctaccacagcagatactaaaggacaagaactggaatatgtccgtcatctgatcgccaatctcgatttacccgtcatcaccctcgatctctccacttccggtaagccttctctgtatcacgcggacgtttctgcacatgagatcgcgggttaccatccggaaggtgaacaagccgttttttgtgctaatcgcgggcaggcgattgcggccatggctgtcgcgtttgagcgcttcatgctctcacgtcgtgatgttgctgcgctgctcggtttgggcgggtctggtggcaccgcgatcatcacgcccgctatgcaacagttgcccatcggcctgccaaagctgatggtatcgagtatggctgcgggtgatgtcgctggctatgtcggctccagcgatattgccatgctgtattccgtcaccgatatcgccgggctaaatcgcatttcacgcaaggtattgagcaatgccgccaaccagatagccggggccatccgctttcatatcgatgatgatgccgacagcaaacccgccaccggcctgaccatgtttggtgtcactacgccttgtatcaaggccgtgaccagcgccattgagcgcgactgggattgcctggtgtttcacgctaccggcagtggtggccaggcaatggaaaagctgatcgacagccgcttgctcaacgccgtattggatctgaccaccaccgaggtgtgcgactatctgtttgatggcgtgttggcctgcaacgaagatcgctttggggccattgcccgcactgagatccctggtgtgatgtcatgcggagggctggatatgatcaacttcggtcacccgaaaaccattccggcccgctatgccaatcgtcaattttattgccacaacagccaggtaacgctgatgcgcaccacggcgcaggagaatacccagttggggcgatggattggcagcaagctgaacgcctgtgccggggaggtatgctttgtggtaccactgggtggcttttcgaccttggatgcgccagggcagcccttctgggatccacaagcgctagccgcttttgttcactcgctggaacggacactggtacagaccgcaaaacgccggttgctcaaagtgccgtaccatatcaacgatcccctgttcgccgcggttattatcgaacaatttaatgccattgctgctacgtctaaataatcctgtcagaaaataaaataaaaaaagccgggcaaataacccggcatttttattttgacagcaatgttaattattcagcagcagggacatgatcgcgcatttttttcatatgctccatcatcttctgctcacgtttctgataattctcattgtattgttttttctgctctggcgttagcaggttatacattttgttttccgctttggcgcgttccagcatgtgctcagattgcgctttaccgatcgcatcgatctgggcttttgccttggcttcgtcgaagctttccgaagcgatcatgctgtgcagtgcctggcgctcgtctttagcacccgggccgcgtttttgatgcgactctttcatgatatcgcgcatctgctggcgctgctcgttggtcaggttcaagccagcaaaaggactgtctctttttgcgtctttatagtgcatcattttcaccggggcggcggttgtggccgatgcggttgccggggcggtagttgtgtcggctgcgaaggcggcagaagcagaacccagggctaacgttgaagcgacaaataaagcagtcagtttacgcataattatttccttaaaagttattcttcatcaggagcgctgtacgttaacaggctcactatctcgtcgtcgaaaataatagtatgcgcatgaatatatagtaatgcgatggagtgtaaattttttaaaatcaaaaatggtaatattcgtcaattatgaataaattatggagaaggcgtctgttatttggaagattacattgcccaagcgtaattattagtgtggcttttgtccacctccagccagggattaatttagcatccctagccacaaccctggctcaacgaagccaaaaactgattttcgcacactgcgcggttctcttttacactctatacagacgtcgttcacgcgatccccatcgtctttcaggttgcagcgtagggtccggcggtccctttttgaggaatgaacatgttcgcagaccaaggcccgatactccttaacacccattttggcaccagcagcccttactggcatctggcgtttgacagtaatgccctgcagttgacggcaatcaaaggcaaaacacaccttgccgtggccctcgacgaaatgcaggcagcgaaaatccgccgtctgagcggggtcaccgccagcctggatctgaccattctgctcagcggccaacccatccacctgcattgggtcggccgccgggtcaataaattggagtgggcgggccccgcctctgcctataccgataccgaggccgtggcacgtgatttggtgcacggcctatcgtttgccgaacaggtggtgtcagaggctaattccgtcattgtcatcgttgaccaacacggccgcgtccagcgctttaaccgcctgagcgaagagtataccggcctgcaggaacaggatgtgatcggcaaaaacgtcttcaagatgtttatgagccccgaagaagccacagcatcacggcgcaatattgccaccttctttcgcaacggggcctcctatgaggtggagcgctggatcaaaacggtcaaaggcgagcggttattcctgttccgcaacaagttcgtccacagcggcagcggcaaaaaagaggtgttcctgatctgttccggcacggatatcaccgaagaacgccgcgcccaggaacgcctgcggctattggccaataccgataccatcaccggcctgccaaaccgcaacgccattcaggatgatattaaccgggcgattagcgaacgcggtgacagccacattgggctggtctatctcgatctggataacttcaaaaaagtgaacgacgcctatgggcatatgtttggcgatcgcttgctgatcgaggtgtcccacgccattctcagttgcctggatcatggagaaaaacttgcccgtctgggaggcgatgaatttctggtgctggtcacccaggccgaccggatcatgctgcaagagctggcacagcgcattatcgaacgcttgcaaatgcccttccgcatcggcctgatcgaggtctacaccggctgttcgattggcattgccctgtgcccgcaacatggccacgatctggacagcctgatccgcagcgccgataccgccatgtacgttgccaaggaacacggcaaacgcacctttatcgtcttctcgccggaaatgaaccgccgcgttgccgaatacatgtggctggataccaacctgcgtaaggggctggaacaggagcaactggtggtgtattaccaacccaaggtcgcaacgctcaacggcgccgtgcatagcgtagaggcgctggtccgctgggattcgccggagcgcgggctgatcccaccattacagtttatctcctacgccgaagagtccgggctgattgccccacttggccgctgggtgctgcaaaccgccgctaaacaggcagctatttggcaacgacaggggctgaatttgcgcatcgcggttaacctttccgccaggcagttagtggatgacagcgtggtaaacgatctggttgaggtactgcgagaaaaccagctttctccctgcacgctggactttgagctgaccgaaagcagcctgatagaagatgaaaaccgggcgcgtgaggtgatcgcccggctacgggccttgggtgcacaggtgcatctggatgattttggcaccggctactcctctctggcccagttggcacgtatcccgctggacgccatcaagctggatcaaagctttgttcgcggcgtcaatctggccccggtatcacaatcattgatacgcgccatcgtcgcggtcgccgcagcgctacagttcaaggtgattgccgaaggggttgagacagacagtgaaaatcgcttcctggactgcgtaggagtcgatgaaaaacaaggattcctgttcgcccggccgatgctgcccgagcaattggaacagtggctgaaaacctatagcccgcaatcaccaaagtgatgcgggcgtgaattaacgcttagccagcgtgacgctgattaagcgtgtgccgatcctgcaagatcaccaaccgctcaatgtacaggcgatccttctcctcgatggtaaaggccgaatgcacccaatcttcggtaatatccatcagctcggagcgggataactgcaatacccgctgacgcgcgcgcaacatggcacgcataccgttcagcttgggcctgatggtgtcgataaaggtacgagtcgccatataggcatcccccggttgaaacagcttatccaccagcccatagctttcgaaccattcggcagtatgagattccccgctccagatcagttcttctgccaggcgcatgcctgccttgcgggctaccagtgaataaccacccataccgggaaacagattgaaggcgatttctgggaaccccatccgcacattgttctgtgccaaaacaaaatggtgcgccaatgccgcctcaaaaccgcctcctagcgcgctgccctccaccatggcgatgctaatggccccagtatcaaagcctcgtgctgcggcatgcacacagtcgatacaggcccgggcatacgccatcatcgcctcacgcttgcggtttttgatcgcttcggcaaaaaagctcagatccccgccgacgttaaacatgttttgcaccagcgagccggtgacccaaaagtcgaactgcaacgtcgactctttcgccgcctgcgccagcgtcatgatgtcttctatcagcgcctgattaaagcaagggcgcggctctgcacgcattagcatccacataatgtggcgatcttcctcgtaataagcggaaagttgcgacaggttgcccgcttcggtaaatgggcgacaggtgggatgattgaataatttcataagaccttccattttatctattggttcaggagataaccgttccagcccctacggctgcattaggcgcatgccggatgaaaaagcgcgcgccataagatgagtaaaagccttcctggcgctgagatagataaaattgcagggatccggcagaaaatcagacgtgtggtgaataggacaaaatcgaacaatctcgcttgcagctgtgggtagaggccattatcagaattaacccaatctcgctcataacggccaaatcgagggcatatttggctataatcaagcacatgcccattgatttacctgaaggataccgtgacgtaatgcagaataaagccgctccagagcagcctgaggccattgagaaaccgacgatcgccatcaaaaccggcaaccaaaaactggataaaggcctttcggggttcgctcgcctgatagagcgcgttaaagcctggcccaccatcgctcacctgctgcgagccactgaacgcttcaacgaccgtcttggcagccagtttggcgccgccattacctacttctcgtttctctctttgatcccgatcctgatggtgtcgtttgccgccgtgggctttgtgctggcatctaacccggatttgctggccgaattgatcaacaagatcgtcaatagcatcagcgatcccaccctggccagtaccttgaagaacacggtaaacaccgccattcagcaacgtactaccgtcggcctgaccggcctggcgctggcgctgtactccggcatcagttggatgggcaacctgcgtgaggcgatccgcgcacaatcccgcgacgtctgggaacgcaatccgcaggatcaggagaaaatctattttcgctacacccgcgattttatttcattaaccggcctggtggtggcgctgatcgtcacgctgtcgttaacctcgattgcgggttctgcccaagcagccatcgtgcatgcgttggggctcgatggcattgaatggctgcggccggcgatgacgttgatcgcactgtcgatctccatctttgccaactacctgctgtttctgtggatcttctggatgctgccgcgccataagccgaagaaaaaagcgctactgcgcggcacgttaatcgccgcaattggctttgaggcgatcaagtttgtgatgaccatgacgctgccgcaggtcgccaaatcgccttccggtgccgcctttggctcggtgatcgggctgatggcgttcttctacttttttgcccgcctgacgctgttttgcgccgcctggattgccacggcagagtataaagaggacaaaaccctgccgcagggcaagtgaatatccgccatcagcattgcattcatgccagtcgcaaggttgcgactggttttttatttcgataatcaaaccaaaaagcagtcaatagctctaaaaccagactaaccaaccggccaaaaccagcataacaaactaccctataacttttcttttcgccttttccagtcattctctctgcttatagcccacttcaccacgttaacgaccatagaacatcaactcgttaaaacattagtctttttaacagtttatttgccagatagtacaaaatctccccgttgaaaagccattttgctatgactaagatgaatttttccctagtcaaaatataagaaataactatgcaagccaccatcgcaacccccttggacgccgataccgcgtccacaccggttaactcccggggaaaagtcatcgtcgcctctctggtcggtaccgccatcgagttctttgatttctatatttatgccaccgctgcggtgatcgtgttcccgcatatcttcttcccacagggcgatcctgccgccgccacgctgcaatcgctggccaccttcgccatcgcctttgtggcgcggccaatcggttctgccctgttcggccacttcggcgatcgcgtcgggcggaaggtaactttggtggcttcactgctgaccatggggatttccaccgtgctgatcggcctgctgccaagctatgcaaccattggcatctttgcaccgatcctgctggcgttggcacgctttggccaaggcctgggtctgggtggcgaatggggcggagccgcgttgctggccaccgagaatgcgcctgccaacaagcgggcgctgtacggctcgttcccacagttgggggcaccgataggcttcttcttcgccaacggcaccttcctgctactctcctggttgctgaccgatgaacagttcatgacctggggctggcgcgtaccatttatcctctctgccgcgctggtgctggttggcctgtatgtgcgtatttcgctgcacgagactccggtttttgccaaggtggccaaagcaggcaaacaggtgaaggtcccgctcgggacgctgctgagcaagcacaaaaaggctaccatcctgggtaccttcatcatgctggcgacctatacgctgttctacctgatgaccgtttactccatgacctacggcacggccgcagagccactggggctgggctattcgcgtaacagcttcctgtggatgctgatggtggcggtgattggttttggcgtgatggtgcctatcgccggtttgctggccgatgcctttggccgccgcaagaccatgattgtcatcactctgttgatgatcggctttgccttcctgttcccgagcatgctgggttccggcaatcagctgttggtgatggctttcctgctgcttgggctgagcattatgggcctgacctttggcccgatgggcgcgctgctgcctgaactgttcccaaccgaagtgcgctacaccggggcctcgttctcgtataacgtggcctcgatcctgggggcttcggtagcgccttatattgcgacctggttggctaacaactacgggctgttctacgttggtatgtacttggcggccatggctagcctgacgctgatcgcgctgctgctgatgaaagaaacccgccacacatcgctgtaatcctctcccggccccctacctatgggggcctgtttgtctgttgtcacaaatcccggctatgctatccccccatttgctgaggaaacccgcccatgtcgttgcgccgttggctctgtttgtctgttgcgttgctgattattatcgccattgccgcctatttttggctgaaaccggcccacccggatgcactgtggcatatcgtcagccagcaatgcctgccaaatcagcagcaaaaccataatccggccccctgcgcacaggtagatgagcaggccgggttcgtggtgctgaaagaccgcaatgggcctttgcaatacctgttgatgccaacggccaaaatcaccggcattgaaagtccgcaggtattacagtccgacaccgccaacttcttcgccttagcctggcaggcccggcattttatggcggataaactcggtaaaccgatcgacgatgccgtcatctcactggcgatcaactctgaatatggccgtacgcaaaatcagctgcatattcatatctcctgcctgcaaccggcggtaaaaacccggctggcgcagctgcaaggggatttcagcgaaagctggcagccgctacccggtggattgctggggcatgattatttggctcgccgcgccagcgctgctgaactcaagcagcttggggcattccgtttgctggctcagggcgttgagggctctagtgataatatggggagctatggcatggcgatgactgccttaccgggaggggatttcctcctgctggctgtgaaacgtaatttgtggcagctgaatctggcctcagccgaagagatccaggatcacagctgccaggtactacagtaatcttggatcacttcttgttcttcatctgctgcaggatcttgccacactggttttcttcgccaccgtcactcggtgaaaccagggccagcaatgccgctgccggagcaacgacaacgcccaacgccacagcagccaccccgcgggcaatcaacggcccggccttcacgccagcgtccggttttttgaacgttcctttaacatacagcggcgaacgcagggtcagcacccgcatccctttgctttctgggtcgatggacagatccagccgctcggtggcgaaattgatattgccgctgatgttgatgatggcgttttccgtatcaaacacgaacagccgtggcgtcgccaacccgctgcgaatgccgacatccgccgccgcacagttgatccccacctcgtcatcgccaaacagttgagctaccaggtagttgcctacgttcaggcccagaatttccatcaggctgcggctgatcacgccgtcattgatcagcaggcgcaggtcgccgctgctggttgccagcaagtcggctaccgagttgccgctgcctgtcaatttggcatcgccgttcaattctcccaggctacgcttcatcgactccacgttcggcagcagctgtttcagctggaacttacgcgcatgcatatccacccggccctgcatcgggctcttgctaccatcaagacggacggtggcattcaggttccccccggccacgccgaagcgcagcgggtccatcaggatcaccgcgttatccagcttaaggtgggtattcagatcgctcagcggcagcgaactgccatgctcaatgcgtttggcggtaaatttgacgtcagcatccattaccccccagcttttggtttcgaacttctcaaccggcagcactttatcgctcggctggcgggtcttctcgccgcgattggctttctgctgattggagtctgcaccgatcaatggcgcaagatcggcaaaacgcagctgtttggaaagcacctctccactcaacttgggccgagggtggctcgcaacgtacttcaaatccccatggatatcgctgtcaccgatcttgccgtcaaagccctgatactggaataccgcgcctcccggttgatgcagctgggcgatcagatgaccatcggtagcataaggaggggtattaggtaacaacacgccggtcagcgcatacaggtttcccaggctgtcaccggagaatttcagccgtagatccagaccgccaaggttcagcggatcggataacgtccccacgacctgcactctggtattgccagaacggacatcgacctgcagtgggaacggtatatcagcgctttgcagtgacagcatgccccccatcttgccactgcctgacagcgcttcaccgtggtattttcctttaaccttccagccgaaaacataatccggcgtcgtcgctttatcccccggctgtttacccgcaacttcactaaagggcagaggcttgccaagtgggtcgatcagcgcctggaaatcggccttgagggtggcgtctttaaaatcaatctggccgcgatcgaacacgatatcgtgaatgctgaccgaccagtctgactgtggttggttggggtctttatcggcgctgttggccaggttgaaggtccagttattgtcaccgttcgccaggcgctgtagcgaggcatttggctgcttcaaccagatacgcgggatcagtacctctttgcccagcagcgccaatggcgcaatcgaggcatcgacacgttgcagtgtgaccatctcgtcgcccggtatcttggccgggttgcccagcataatatcttcggcgtggatatgcggccaaggtacccaggcacgccaacccccctcatcctggtgacgttcccagttaacgcccagatcgccacgaatagcaaacgggcgctgcagctcggcagagactttgctattgatggtgggtttgagacggttccaatcgaaggtggcaatgaagaccaccaaaaccacgatgatcagcagcacgatgccgccaatccagctaaaagttttgcccattcttgtcataacagctccctcgaggcgatagcagactgctcaaattgataagcagccttactgaaagcctagtagaggataggcctaagttcacgctttgggaactaatgggtcagggggtgggggcaataaaccgcgtaggcagggttttaagctggtcaaaatgtgcagggcggctaaggtaatacccttgggcggcaaacgcaccagaacgctgtaccagccgccattcctgctctgtttctaccccttcgacaatcaccccgtcgctgtgctggctcatcaggcgcaccagagtaaaaaacagctggatgccctcatcgctctgcttgagcaacataaacagctcgcgcgccaccttgatatactgataacgccagctgctgaccgcggagaaattcgccagcccgctaccgaaatcatccagccacaggcgctctgctccggggatatgctgcagcggtccattcaacgccctgtctgcctgctccaccagctcaaaacgcaggtaaggcatgacgctgatttgtcgctgcatcgccgggtgccgctgtagggcctgcaatgccttaccgtcgatattgatggagaccattagcgcatgacgggtaaacaggggctgccattgctgcagtaaatcgagctgttcctgaatgaccgccaggcgctggcgtagccccagcgcagcaaagtaatgttctggggataccggcttattcggtgacgccggatgatgtaccgccgtgagcaactccaccgccagcagtttgccgcaggtgcggtaaataggttgaaaagtatacaaacgccgacactgccgccagtaatggaagaccttggcacgctgccaggcggcaaacaatggcgtcagtaaaccagagatcatgttggttatcatcggtactatcgccattagggaatgggaacgataacgttgccggaaatttgtcgatcttgttatcggcaacgcacaataaaactttaagcttgggtaaaaggtccctacattaagccattacctacatgcaacgtttcgataacaagaggaaattttaatgccctacgtaaatatcaaaattacccgcgagggtgcaaccgcggagcagaaaaaacagctaatcgcaggcgtaacccaactgttggtcgatacgctcggcaaaaaccccgccactaccgtggtggtgatcgatgaagtggagaccgataactgggggattggtggtcaatgcgtcaccgatctgcgcgcggcagccaagtagtttttcttcctcaacggcgggaaacttcgcgtttcccgatcgcgatcataaactaattaaaacgctgttttattcctattgactcgcttcgcccttgcgttgagactggacgtattcgcagcaaccagactcattatcaagccagggattatcatgaacagcaaaaacctcgccgtgatcggcgaatgcatgatcgaactgtcgcagaaaggcgccgatctcagccgtggattcggtggcgacactctcaacactgccgtctatatcgcccgccaggtgccgcaacaggcactgaacgtgcattatgtcaccgcgctgggcaccgacagcttcagccgggaaatgctgcaaacctggcagcaggagcaggtgaaaaccgatctgatccagcaattggacaacaagctgccggggctgtacgtgatcgaaaccgacgataccggcgagcgcaccttctattattggcgtaacgatgctgccgcccgctactggctggatggcccccaggcagagagcctgtgcgcgcagctggcgcagtttgattacctgtatctgagcggtatcagcgtggcgatcctcaaccctgccagccgggccaaattgctgaccctgctgcgccaatgccgggccaatggcggcaaagtgatcttcgataacaactatcggccacggctgtggcaaagccagcaagagactcagcaggcctatcgcgagatcctggcctgtacagacatcgccttcctgacgctggatgatgaagatttactgtggggtaaacagccggttgagcaggtggtgagccgtacccgcgactttggcgtaagtgagattgtgattaagcgtggcgcagattcctgcctggtcttctgtgccgatggggaaactcacgacgtaccagcggtcaaactgccaaaagagaaagtgattgataccaccgccgccggggactccttcagcgcgggctatctggcagtgcgcctgaccggcggtgatgccgttagcgcggccaaacgtggccacctgaccgccagcacggtgatccagtatcgcggggccattatcccacgcgaggcgatgccgcagtaatttccgtcgtctagataggcgaaaggccagcaacgatgctggcctttttagttggcccgataaatcgggccgctacaatcttggtgcttaaccagctactgcgatacgtttcatatcggtcatatagccacgcagtttgcggccaacggattcgatcgggtggttgcgaaccgcttcgttcacgtcacgcagctgcgcgttgtcaacggtggtaccagcaacagatttacccaaatcgcccgcctgcagagtggtcatgaactctttcagcaacggtaccgccgcataagagaacaggtagttaccgtattctgcagtatcggagatcaccacgttcatttcatacagacgcttacgcgcgatggtgttagcgatcagcggcaactcgtgcagtgattcgtagtaagcagactcttcgatgatgcctgaatccaccatggtttcgaaggccagctcaacgcccgctttcaccattgctaccatcagtacgccgttgtcgaagtattcctgctcgctgattttgccttcaaactgcggcgcggtttcgaaagcggttttgccggtctcttcacgccaggtcagcagtttcacatcgtctgcggcccagtctgccatcataccgctggagaattcgccagagatgatatcgtccatgtgcttctggaacagcggagccatgatgcctttcagttgctcagacagcgcataggcacgcagtttcgccgggttggacaggcggtccatcatcagggtaataccgccctgcttcagcgcttcggtgatggtttcccagccgaactggatcagtttttctgcgtacgccgggtcggtaccttcagacaccaacttgtcgaagcacagcagagaacccgcttgcagcataccgcacaggatggtctgctcgcccatcaggtcagatttcacttctgccacgaaggaagattccagcacgcctgcacgatggccgccggtggctgccgcccatgccttggcaatcgccatgccttcgccttttggatcgttttccgggtgaaccgcgatcagcgttggtacaccgaaaccacgtttgtattcttcacgcacttcggtacctgggcacttaggtgcaaccatcactacggtgatgtctttacgaacctgctcgcccacttcaacgatgttgaagccgtgggagtagcccagcgcagcaccgtctttcatcagcggctgtacggcacgaactactgaggtgtgctgcttgtctggcgtcaggttaactaccagatcggcctgcgggatcagatcttcgtaggtgccaaccttgaagccgttctcggtggctttgcgccatgaggcacgcttctcggcaatcgcttctttacgcagcgcataagccacgtccaggccggaatcacgcatgttcagaccctggttcagaccctgagcaccacagccgacaatcaccacttttttccctttcaggtaaccggcttcatccgcaaattcgtcacgcgccatgaaacggcacttacccaattgcgccaactgctgacgcaggttcaatgtgttgaaatagttagccatggtgatgctccagttaatgttgtgtcgtgcaatattattctcatccccgccctgtcggtacgggatccgttgaaaccaatgtataacaggaattgcgttgcttaaattgatatattacgaacgtgacgttgcaatttctgcaacaccccgctgcgagcgtactgactatggacttacgtgatctcaagctgttcctgcacctggcggaaagccatcactttggccgtaccgccaaggcgatgcacgtcagcccctccacgctttctcgccagatccaacggctggaagaaacgcttggacaaccgctgtttctgcgtgataaccgcaccgtagagctgaccgatgcgggtgaacagctgaaagtgttcgcacaacaaacgctgctgcagtatcagcagttgaaacattcgcttggccagcacggcccatcgctgagcggcgaactgcgtttgttctgctcggtgaccgccgcttacagccatctgccgccgatcctcgatcgcttccgtgctcagcatcccctggttgaaatcaaattgaccaccggtgatgccgccgatgcggtggacaaagtgcagtccaacgaggccgaccttggtatcgccgggcggcctgaaaccctccccaccagcgtcgccttcacccaaatcggtgagatcccgctggtgctgattgctcccgctctgccgtgcgcggttcgaacgcaggcttttgccgagcagccggactgggccaatatgccgtttatcctgccggagcatggcccatcacgaaaacgcatcgagctgtggttccgccgccagcacatcaccaatccgctgatttacgccaccgtcggtgggcatgaggcgattgtttcgatggtggcattaggctgcggtatcgcgctgatccccagcgtggtggtagacaatagcccagagccagttcgcaaccgcatttctcagttggagaatatctcgatggtcgaaccgttcgaactgggggtctgcgtgccgaaaaaacgcctcaacgaaccgctgattgaggcgttctggcaacttttgtgaatagcagtgcgatccccactcaaaactcaatgaggttgtttatcacaacttaataataccctatggatttcaagtcacagttaggcggccagctcgctcatccccaggagcttacttttgggtgagtgagtgcagccaacaacgctgtggcttgaaagacgacgggtattcataggtcttggggatcgacctgcttcatcgcttctacctgcatcagccactggtacagcggctccaactgctggaaaccctgggtcaaggtagcgaccagatcggcgctgaacagcttttccacctgattatctgtggccatcaccgcaaaggacttacggttgtaccaagtggcaatctccggtgcctgctccaacactcgcgggcgcttatagctttcccccaccagctcgaacggcgcgcggcagcactcggccacctccaaaaacagctgtggcctgcgcagcaaggtatggcgaaacagatccatggtggctttgtcggcgctgtaatagcccaggccataacgcagcatgtccggccccagctcaaagaaatacaccggtgccagcttccagtctttgcttggccgcttgaaggtcagccacatacggctacgatagcgggatttatcatgggaaaaacgcgtgtcgcgatgaatgcgcgacagcgttttgccaatggccggacgggtttcaaactgcgggtcaatcatcagcatcgcaggactcagtgcatccaccagcgaacgaaacggcgttaacagctcacggtcatacacgccccgattggcatcaaaccactccttgtcgttctcgatccgcacctgttgcaggaagtccagcccttgttggctgaacccggtgaactcattggtcatacgcaatccttgtcgccgaggttagccctgtaggaagaaccggaaggccgggttgtcggtctcatcatggcagtcgtaacccaacgcctgcaggtgctgctcaaactctggctcggtctgcgaaagttcaaaccctgccaacacgcgaccaaaatcggtgccgtggctgcggtagtggaacagcgaaatattccagtgcgtgcccagcgtttgcaggaacttgagcagagcgcccggtgactctgggaactcaaagctgtacagacgctcacgcagcggtttcgaaggccgcccgccaaccatgtaacgcacgtgcagtttcgccatctcatcgtcggacaggtccactacctgatagccatcacggttcagctcatcgatgatttccagccgctcggtatggcctcgggtcaggcggacaccgacaaaaatgcaggcgttgtcggcatcggcatagcggtagttaaactcggtaaccgcacggccgcctaacagctggcagaacttcaggaagctgcccttctgttctggaatggtcactgccagcagcgcttcgcgttgttcgcccagttcgcagcgttcggaaacgtagcgcaggccgtggaaattcacgttggcaccggaaagcacgtgggccagccgctcaccctgaatattgtgctgctgcacgtattttttcagccctgccaacgccagcgcgccagaaggttcggcgatggcccgcacgtcttcgaacaggtctttcaccgctgcacagatcgcatcgctgtcgacggtgatcacgtcatccaggtattcacggcacaaacggaaggtttcatcaccgatgcgctttaccgccacgccttcggcaaacagcccaactcgcgccagatcgaccggctgcccggcatccagcgccgcacgcaggcaggccgaatcctcggcttccacgccaatcactttgatttgtggcatcaactgcttgaccagcaccgccacaccggccgccaggccaccaccgccaaccgggacaaacacccggtccaggtgcgcgtcctgctgcaacagctccatcgccaaagtgccctgcccggcaatcactgctgggtgatcgaacgggggcacgaaggtcatgccctgctgctgcgagagctcaatcgccttgaccttggcttcgtcgaagttggcaccgtgcagtaacacttcaccgccgaaaccgcgcaccgcatcaaccttgatatccgccgtcgacaccggcatcacgatcagggttttgatccccaaacggttgccggaaaaggcgacgccctgtgcatgattgcccgcagaggccgtgaccacgccacgtgccctctgctcttcatccaggctggcgatcatcgcgtaagccccgcgcagcttaaagctgtgcaccggctggcgatcttcgcgcttcaccagaatggtattgccgaggcgcgaagagattttgcccattgtctgtaacggggtgacctgagccacctcgtaaactggcgagcggagtaccgctcgcaaatattccgcgccgcagggggcgtcgggtaggggttgtgataccgccatggtggttagcctcccagcttgctcttgtcccgcactgcgcctttgtctgcactggtagccagcgtagcgtaagcacgtaacgcataagatacctggcgctcacgcgctttcggtgtccaggccgcatcacctcgtgccagttccgcctcacggcgtgcagccagtacgctctccggcacatccagcaccatgctgcgtttcgggatatcgatatcgatcatgtccccttcttccaccagcgcaatcaggccaccgctggccgcttccggcgaaacgtgaccaatagataaaccggaagtgccgccagagaagcgaccatcggtgatcaacgcacaggccttgcccagccccatcgatttcagataggtggttgggtagagcatttcctgcatgcctggcccgccttttggcccttcgtagcggatcaccactacgtcgcctgccaccactttaccgcccaggatcgcctcaacggccgtatcctggctctcataaaccttggctggcccacggaaggtcaggttgtctttatccacgccggcggttttaacgatgctgccgtcttccgccatgttgccatacagcaccgccagaccaccctccaggctgaaggcgttttccaatgagcggatacagccatcggcacgatcgttgtccagcgtgtcccaacggcagtcttgagagaatgcctgggtggtacggatacctgccgggcctgcgcggaacattttcttcaccgactcatcctgggtcagcatgatgtcgtacttttccagggtctctggcagcttcatccccaggatgttatccacatcgcggttcatcagcccggcgcgatccagctcgccaagaatggccagcacgccaccggcacggtgtacgtcttccatatggtatttctgagtgcttggcgccactttgcacaggtgtggcactttgcgggatagacgatcgatatctgccatggcgaagtcgatctcgccttcctgcgcggctgccaacaggtgcagcacggtattggtggagccacccatcgcaatgtccagcgtcatggcgttttcgaacgctgccttgttggcgatgctgcgtggcagtgcgctctcatcgtcctgctcgtagtaacgcttggtcagttcaacaatgcgcttaccggcgttcaggaacaggtctttacgatcggcgtgggtcgccaacagcgagccgttgcctggttgggacaggcccaacgcttcggtgaggcagttcatggagttggcggtaaacatcccggagcacgagccgcaggttgggcaagcggaacgctcgatttgtgcgctgtcggcgtcgctgacgttcgggttagccccctggatcatcgcatcgatcaggtccagcttgatgattttgtcggaaagcttggttttaccggcttccatcgggccgccggaaacgaagatcaccggaatattcaggcgcagtgacgccatcagcatccctggggtgatcttgtcgcagttggagatacacaccatcgcatcggcgcagtgggcattcaccatatactccaccgagtcggcgatcagttcgcgcgacggcagagaatagagcatgccgccgtggcccatggcgatcccatcatccaccgcaatggtgttgaactctttggcaacgccgccggaggcttcgatctgttctgcaaccaacttgcccaggtcgcgcaggtgcacatggcccggcacaaactgggtgaaggagttgaccaccgcaataatcggtttgccgaaatcgtcgtcggtcatcccggtcgcgcgccataatgcgcgggcacccgccatgttgcggccgtgggtggtggtggcggaacggtacttaggcatgctcttcactccaaaaatagtcattttacggatggcgaacgaaccatccgtttagtgttgtctgtcgttattggtttaccggatccaaccagccgtacttgtcttcggttttgccgctgaacaggccaaagaatgcctgctggatctgcttggtaattgggccgcacttgccgatccccacctgaatgccatccacgctgcgcaccggcgtgatttccgccgcggtgccggacataaacacttcgtccgccagatacagagactcacgggaaagcacttgctcacgcacttcgaagcccatgtcttttgccagcttgatgatcgcgtcacgcgtgatacccggcagagcggaggaggtgaacggtggagtaaacagcacaccgtctttcacttcaaacaggttctcgcctgcgccttcagagatatagccatgaacatccagcgcgataccttcctgatagccgtggcggcgtgcttcgctacccaccagcagtgaggaaaggtagttgcccccggctttcgccgcggtaggaatggtgttcggtgccacacggtgccaggaagagaccatcgcatcgataccttgatccagcgcttcttcacccagatacgcgccccaaggaaacgccgcgataatcacgtcggttttatagcctgccggtgggttaacgcccatgccaacatcaccaacaaacaccaaaggacgaatataagcgctgaccagattgtttttacgcaacgtagcacggcaggcttccatcagctcatcgacgctttgcgttaccggcatgcggtaaattttagccgagtcatgcagacgctgcatatgttcacggtggcggaataccaccgggcctttatgggagtcgtagcagcgaaccccttcaaataccgacgtcccgtagtgtagcgcatgtgacattacgtgaactttggcatcggcccacggaaccatctcaccattgaaccagatataatcagctttcttcgtcattgttctgttccttttgcgcaatcaggcgcgtatttgttgtgatgattgttgctggatctcaacgctggagacatccatcagtttgcttagctgagatgacagtaaatccacagggcgctggctggcaacggtcaattcaatatttatatcgtcgctattgctgcccgaagccatattcatagcacagacctggaagccacggtgacggacaacgcgcaatacgcgctctaacatttcagggcggaagcgggcctggatcgagagttgatgctgcatcatgatactttctccaacatggtttcgttgcctgcgcccggcggcaccagcggccagacgttctcgagttcatcaatggaaacctgcaacagataaggcccttcgctgttaagcaaggtatcgagcgcgtctgcgacctggtctttgcgggtaatacgttggccggggatgccgaaggcgctggccaatatcaggaaatcggggttatcggagaggttggtttcgctgtaacgaccatcaaagaacagttgctgccactggcgaaccatccctaaacgctggttatccagtaacacgattttcagcggtaactgtttgcgtttgatggtgcccaactcctgcacgttcatcatgaaggaaccatccccggacacgcagatcaccatgtcctccgggcgcgccatctgcgcacctaccgcagcggggataccgaagcccatcgtccccaacccgctggaggtgatgaagttctctgggcgttcaaaactcatgtgctgcgcggtccacatctggtgctggcccacgtcggtggtcaccacggtattggccggtttgcgttcggacagttgcttgagcaacaacggagcataaatcggttggcccgggtggtcgtaacgccaagggtgagtttctttcagctcggccactcgttgcagccagggagcgatctgcatcggctgttgcagcgctggcagcaaggttctcagatccccttgcagggccacatgcgcctgacgcagcttgctcatttccgccggatcgatatccatgtggatcaccttggcctgcggcgcaaaggcgttcagcttgccggtcacccggtcgtcaaaacgcgcgcccacggcgatcagcaaatcgcactcctgcacggcgaagttggcagctttagtaccatgcatacccaacatgccgagataatacggatggtttgcatccggtgcgcccaggcctttcaaggtcgccacggttgggatctgcgtcaactcgacaaattcccgtaatgccgggacggcctgcgccatccccacgccaccgcccacatacagcatcggcttcttcgcctgtgccagcagttgcgtggccatggccaactctgctgcgggatgttcgaacggatcttctaccggcatcagatgaggaggcaaatcaccctgcgccagttggatgtctttcgggatgtcgatcagtaccgggcctgggcggccgctggtggcaatggcaaacgcctctgccatgatccccggcagcgcttccagcgactccaccaggaaactgtgtttggtacaggccagagacaggccaagaacatcgatctcctgaaaagcatcggtaccgataagcgcagaaccgacctgaccggtgatcgcaaccactggcaccgagtccagcagcgcatccgccaacccggtgatcaggttggtcgcgccaggaccagaggtggcgatacagacgccaactttgccgctggaacgggcataaccaatggccgcaatcgccgcaccttgctcatgacgacacagcagatgttcaaccccgccgtcatacaacgcatcgtagaccggcatgatcgcaccaccgggatagccgaataccttgtctaccccctgcgcacgcaacgcttgaaccacccactgagcaccattcatggttatttccccgccttgctgcgggaagtgcaggattttattctgttggtcattctctgctccttgttgacattttcttggcataaaaaaacccccggaccttttgggtgcgggggttatcttgcgattccggcttgttttctaagcctttcttcgtccaagtgcagccccgcacggtgggataataatcaccaccacgctaatcacgactaggctaatcacttgggctagggctttcataattgggttgttcactgtgctcgtttcgaactaatgcctacagagttaccatagcagccggtaacctgacaacactttttttgcgttattattcggcgctgtcgggtcaaagctgcaacaaagcgcatgaaattcaaacgctaacaccagcaccaggcgctttactttctaccgcaatcggtttgccgcgcgtatccttgccaaaatacaccagcaccgcgatcacgatagccaccgtcccggcgattatcgccatcgccaggccgtagttttgcccatgatgctccgcaatcgcggcctgcaaggtggcattcaccgaagcaatcaggttacccaattggtaaacaaaccctggcaataccgcgcgagtattcgctggcaccagttcgttgaggtaggttgggatcaccccccatgccccctgaaccatgaattgcatcatgaacgcccccacccccagcatcagcgaaccactcgcgaatgcccacagcgggatcaccggtaacgccagcagggcagcaataattatggctttcttgcggccaattttttccgacagggtaccaaagaaaataccgccgataatggacgcgatattgtagctaatggcgatgatactgacggttttaggatcgaaaccgtgctgaattttcaggaaggccggatacatatcctgcgtgccgtgggagaagaaattaaacgctgccatcagcagcaccagatagagacacagcttccaatggctcttcagaacgggcagcaaagcggtgctttctttacgtgcccgtgccgccagccacaccggcgactcttccacgcagaagtagataaacggtagcaacaggatcggcgcggccccgatcacgaacatgccacgccagccgaccacttcaaacagcaggccataggccaccgccgccaacagatagccaaacggataccccgcctggaagataccggacatcaggccacgcgaacggtctgggatgctttccatcgccagcgaagaggccacgccccagatgccacccatcgccacgccgtaaagcactcgcagcaacaggaagacggtcaaagaaggagcggccgccgacaatagctcaaataccgagaaaaacacgatattcaacatcaggatcggtttacgaccgtacttttccgccgcacggccaaaaataagcgcgccaatcgggcgtaccgccaacgtcagcaggatcgccagggtgacttcttccatcccgacctgaaaagcctgagctatatcgctgagcaggaagaccagcacaaagaaatcgaaagcatcgagcgtccagcttgaaaagctggcaattgccgcattgcgctgcagcggagtccaaccaaacatagtgttatccctaccgtagagtacgaggtcatcagatttagcggcggccgcagcgggtgcggtagcggtcgaggctttgttaaagaagtgatttttattttaaccaattgttaaatacacccattaaccctgctgttgcaacttggttagcttgctaatgtgtttcagctttcccgtaattgttaatgggtattacaacgaaatgcgtagcacctcgaaaaaaatcactaacatgatgaaataaattacttttaattttgtagcactacgcaagttgacgatgagtagcgcgcggctttcgggctgttcccgcatcatgttgccttcagcgaggagagcaatatgtcattggcggtaatctatacccgtgccacgatcggcgtgcaggcgccttcggtcatggttgaagcccatatcagcaacggattacccggcctgacactggtcggcctgccggaaaccacggtgaaagaagcccgtgaccgggtgcgcagcgcactgatcaacaacggcttcacctttccggccaaacgcatcaccgtcaatctggcaccggccgatttgcctaaggaaggggggcgctatgatttacccattgcgctggccattctggcggcctcagagcagctgccagcagataagttggcgcactatgagttcctgggtgaattagcgctttctggcgcattgagggcggtgcacggcgccattccggcggcaatagcggcagccgaggccaagcgggagttgatcctggctgcggccaacggcaaagaggcggggttgcttcccaacagcacgacccgagtcgcagaacatttactggaggtgtgcgcttttttgcagggtaagggggatctgccaatcgccgtagcgcctcctgcggctgccacgtcaacggaaactgccgacttgcaggaagtcattggccaggaacaggcaaagcgagcgttggaaattgccgcggccgggggccacaacctgttgctgcttggccctccgggcaccggcaaaaccatgctggccagccgcctcaatggcttgctgccgccgttaagcgatcgggaggcgctggaaagcgtcgccgttgccagcttactgcatcatccagatgaaaccctgccatggcgccagcggccgtttcgcgccccacaccacagcgcctcgatggctgccctggttgggggaggctccttgccacggccaggggaaatctccatggcgcacaacggcgtactgtttctggatgagttacccgaatttgaacggcgagtattggatgcgctgcgtgagccgctggaatccggtgaaatcgtcatctcacgcgccagcgccaaggtacgcttccctgcccgagtgcagctgattgcggcgatgaaccccagcccaaccgggcactatcagggcatacacaaccgcactccaccgcagcagattttgcgctacctcggcaggctctctggccccttcctcgatcgatttgatttgtcgattgaggtgccgctgctgccaccgggcgtactggccaagcagcaccatgcgggggaaagcagccaacaggtacgtcaacgggtgctggtggcgcgcgagcagcagctggcacgggctggtaaagtgaatgcgctgttgagtaaccgcgaggtggatcgggattgccatttgcctgcagctgaagcggagtttttagagaaaacgctgagccaactgggattatcggttcgagcctggcatcgcatcctgaaagtggcacgcacgctggccgatttggcaggggaacaacagattgataaacgccatctcagcgaagcgctcagctatcgcagtatggatcgcctgctgctgcagctacaccgcagcctggaataaaaaatggggccgaatggccccatgatgatcaatcgtcgctttcagtgtagtcttctaccgcatcagcctgcggcttgccacctgacagcgtatggaattttttcgggcggcgggtgcgcgccagatatttagaccatactttttcttgctcggttaccggttcacgctcaccgcgacacactgcaacgaacaactgttcttcttcagtggctggctggcgtttgccggcatccaactcgttgaacgcatacccgaaacgctctagcaattgcgcttctttaatggtgaaatcgccgtgacgggagaacccgcgaggatagtttttattatcaaaaaaacgactgttggtggtgaagctatccgccatctgacacgctcctaattctctcatggccgtgctgtttatggcgcggagtattagataggcttgacatcgtgtaaaacaaaacatttaaatcttaacgataaaaaactttggagattggtgtggacaccgaattactgaaaacctttttggaggtcagtagaacgcgacactttggccgcgcagcggaatccctgtacttaacgcagtctgcggtgagtttccgtatccgtcagcttgaaactcaattaggggcgaatttattcactcgccaccgcaacaacatccgcctgacacccgcaggagagcgactgttgccctatgccgagagcctgatgaacacgtggcagttggcaaagaaagaggtgatacgatcgctacagcacagcgaactttcgatcggtgccaccgcgtcgctatgggaagcttacctcacgccctggctgcaatcgctctaccagcagcgggaggccttgcagctcgaagctagggtagccctgcgccattcgttggtgaagcagctacatgaaagacagctcgatttgctaatcaccaccgaaccgccaaagatggatgagctggccagccagctgttgggtaacttctcgctacgcctgttttcctcgtcgctacgcgataaccccgcccccatgccttacatcaaactggaatggggtgccgattttcaccaacaggaagcccgcatgcttgagggcgacagcatgcccgtgctgaccaccacttcagcgcatctgacgcgccaattgctggagacaaccggtggctgtgcatttctccccagccagtgggaaaaagactaccctcaactggtcgctgttgctgacgcccagccgatcgttcgtccgctttatgccgtctggctgcaaaacagcgaccagcagccgttaatccgccaactgctgaaaatacctttaaataccgcaacctgagcggctatgacggcttcaggcgtggatggcggggttttgcccgtctggtctgccaaaaggcgctcatcgccttctggaggccgataaagcagaacagcaggatgccgatgacgattttggtccaccaggagctgagggagccatcaaaagtgatgtaactttggattaagccttggatcagcacgccaaacaaggtgcccaaaatggtaccgacgccgccagtcagcaatgttcccccaatgacgaccgccgcaatggcatccagttcgacaccgctggcagccagcgcataaccagcggaagtgtatagcgagaaaattatgccggagagggccgccagcgtgctggaaagcatgtaaatctgaatagtggtacgccgtaccggcacccccatcagcccagcggagaccggattccccccgatggcatagacgttatggccaaaacgggtgcgatgcgccaggatcatgccaatcgccacgaccagcagcattaccagcgccaataaggtaaatcggccaccaccggggactttccaggcatagtttgccagcgtggcatacagcgggtgatcgatcggcaaagactcttctgacacgataaaactcatgccgcgcacaaagaacatccccgcgagcgtgatgataaatgcaggtaatttcagcgcgtcgatgatccaccccatcagcgcaccaaatgaggcccccatcaacaaggcaatgacaaatgcataacctggagcaataccataagtgccaatcagcttggccagcagtacgccggtaaaggcgatcaccgagcccaccgaaagatcgatgccgccggaaaggatcacaaaggtcatgcccacggccacaataccgagaaaagcgttgtcggtcagcagatcgcaccagacgcgggtggaagcgaagctggggaattgactaaggcaaaaggcgtagcccagcagaaaaaccacaatagtgatcaataggggaaggttacgcttcatcatgatttacgtctccgccacaaccgctgtaatgacacacttggggattgcaccagcaacacggctaataccaccaccgctttcagcaccaggttaaactccggtttataacccgaaagcagaattccggtattcattccctgaatgattaacgcccccaccaccgagagcagcagattaaaacgcccgcccagcagtgacccaccgccaatcaccacggccaggatcgcatccagttcgagccacaggcccgcattgttggcatccgcaccgcgaatatccgccgtaacgataacccctgccaccgccgcgcacaggccgcaaatgatatataccgcaataatcacccagcgtgtactgacgccagcattacgtgctgagcgcaaattgataccgaccgcttcaataaacagccccaaagcggttttgcgtgtcagtaaccaaatcagcagcagcatgagagtagcaatgatcactggcatcggcaggtacatcagcgaaccacttccaagcttggctaacccttgactttcaaaggtgacgatttgtccttcggtaatcaactgcgcgataccgcgcccggccaccatcaacatcaaggtagcgacgatcggctggatttgcagcaccgcaaccaagaagccgttccacaggccacacagtgccccaaccgctaatgcggcccccaggatgtatgctaatgggtaaccagcgctggtcatggtggctgcggtcgctccggcaatcgccatcaccgcaccgacggagagatcgatcccaccggtggcgatcactagcgtcatacccaaagcaagcagcgcgacaggggcgccacggttaaaaatatcaatcacgctgccgaacaggcggccatcctggatatggattgaaaagaaatggggggcgaccaggctatcgataagtaaaatcaccgccagcgcccccagctgcgtcgctccggcgggcattacccaccttactttgcgcggtccaccggtcatgggaaaactcctgtggttcatgctgccccctgttgcacggcaatggcctgcataatggcgggaaccgtaatggcatcatggtcaagttgcgccacatgttttctatcgcgtaataccacgatgcgatcggcatagcctgcgagctcctccagttcggaggaaataaccagcagtgccaacccttcatcacagagccgttcaatcaggcggataatttccgcatgggcccccacgtcaatgccacgcgttggctcatccaggatcaggaaacggggtttggtcgccagccagcgggaaagcagtaccttctgctggttaccaccggaaaggtactggatttgctgctccggccccggcgtgcggatccccagcagtttaatgaaatcttccgcaattcgggtttgctcacgcagcgggataggccgtaaccaaccacgctgcgcctgcaatgctagaataatgttttcccttaccgtggccgcgccgacaataccgtcggtcttacgatcttctgggcaatagccaaatcccaggctggccgctttacggggcgttgggatcgccaccgttttgccctcaactttcgcaatacctttatcccgagccttaatgccgaagatcagttgtgccgtctcagtacgccccgatcccagtaaaccagccaggccgacgatttccccaggcctcaacgccagatcaaagggctcaaccatgccgcgtcggccataaccgctaaactccaccaaaggcggagcctgcacggcctgatgttcgctgcgtttgagcagcgtctcatcaaaactatggccaagcatcatctgcaccaactcgagccgtggcagctcggcggtgacacgagtcccgaccagcttgccgttacgcaacaccgtaatacgatcgctgatgcggtaaacctgctcgagaaaatgggtgacgaagatcatccccattccctgagatcgcagttggctaagaatatccagcagcatggtgacctccttggcatccaggctggcggtgggttcatccaggatcagtaccttggcggagagatcgacggcgcgagcaatcgcgacaatttgctgaatggcgatcgagtaattgcccagcagctggctgacatccagcggtaaaccatagccttccagcagctgacgggcattacgcaacatggttttttgatcgatcaggccaaaacgggtaggttcgcgaccgataaacagattggcggccaccgagatattaggcagcagattaacttcctgatagacggtgccaatccccaacgattgcgcctgggccgtattctgtggcgcaatcgcggtgccttctagccagatctcaccggcggagcgttggtaaacaccggtcaatgccttaatcagcgtggacttgcccgcgccgttttccccaagaagcgccaccacctcaccgcgttgtagtgtgaaatcaacctgctccagcgcttttacacctggaaactccacggataacccgcttattgccaataatgctgcctgaggtgtagccattatctgctccgcctgttaacgatcaatatcccatgcttttcttcatatcgtattcctgtctggcagtttcaggctgcagcagtttcgactcggtctggataaatttctgtggctgtgtgccgtcttttttcaatgcaatcaaggcatcaaacgcaggtcctgccatatttggcgtcagttcaaccgtggcgttggcttccccttccatcatcgctttgaagatatccggcacgccgtcgatggaaacaaccttgatctgtgagcccggcttgaggccggcttctttgatcgcctggatggcaccaatcgccatatcgtcgttatgtgcatagacggcgcagatgtttttgccgttctgttcagccttgataaagctttccatcacctctttacccttgctgcgagtaaagtcgccggactgcgaacggatgattttgacgttgtcggcagaggcaataccgtccgcaaagcctttcttgcggttaatggccacgctggccccaacggtgccttgcagttccaccacgttacagggcttgcccgcaacggctttcactagccattcgcctgcgactttcccttcatggacgctgtcagaagcgacggcagcggtatacagcgagggatcgttcacttcgatcatgcgatccaacaggaagaccggaattttggcctctttcgcttcctgtaataccggggtccaaccggtggccactaccggcgcaatgaagatggcgtcaacgccttgagcaataaaggatctcaccgccttgatctggttttcctgcttttgctgtgcatcggcgattttcagcgtaataccccgtttttccgcctcctgtttcgccactttggtttctgccgaacgccatcctgattcagaaccaatctgagaaaagccgacaaccaagggggcagcctgcaccgctcccatcaacacaccgcttacggcggccgctaacagtaaacgcttaaccatgtttttctcctcgctctgcctgaatcggtcaaacagagatggcagtgggtgtattcgcttttatcgagtgtgcccaaaaaactcgtggggcttataaggtgtagttgaaatacagacaggaatgatgagcgatatcacagcgcgggattacaaccattttgtacatagatacagctagaaatgtctaaattgggaacgatttcggcaggaattttgtacgcgttagcgggaggacgggcaattctaggcgaatagaaagcaaaaaaaacccttcgctttcgcaaagggtttctaatatggcaggggcggagagactcgaactcgcgacacccggttttggagaccggtgctctaccaactgagctacgcccctaaattacgcttaacattatgcctgctaacggtagcaggcataatttaaataagtggcggaacggacggggct

SEQ ID NO: 348 - DNA, 593 bp, unknown
  Altogen  635822 strain
  misc_feature (51)..(158): n is a, c, g, or t
  misc_feature (440)..(527): n is a, c, g, or t
ggtagcgacttcatcagttggatttgtcggtagacaatatcctgcgtaacnnnnnnnnnnnnnnnnnnnnnnnnnnnnnnnnnnnnnnnnnnnnnnnnnnnnnnnnnnnnnnnnnnnnnnnnnnnnnnnnnnnnnnnnnnnnnnnnnnnnnnnnnnnntaggccaacgggtgtattgcccactacgtcacgcagcccctctgaaagccgttgcgataccgaacgccattgttgccactcttccccctccccctgtatggccatgtttagagcgaccttggcggcccactcgtcaatgacatgcgaatactcgataaggtggccagcaaccgtgtcagcgcttacttgggaaccatcgtaagaaccagttactatcccgtttatctggcttgctatccccagtaggcttttgctgtaactgcgttccgaacgtcggcgggnnnnnnnnnnnnnnnnnnnnnnnnnnnnnnnnnnnnnnnnnnnnnnnnnnnnnnnnnnnnnnnnnnnnnnnnnnnnnnnnnnnnnnnntaagtcagttagcgcagcggcaggagacatccccaattcacgtacagccgtcgctagtgcagtcgt

SEQ ID NO: 349 - DNA, 976 bp, unknown
  Altogen  635822 strain
  misc_feature (99)..(168): n is a, c, g, or t
aaccgttcagctatgggattaagtatggagaaaatcacctcattttttgcctatgccgtggccgtgctgctggcttgggtgggcaagtattccgcgcannnnnnnnnnnnnnnnnnnnnnnnnnnnnnnnnnnnnnnnnnnnnnnnnnnnnnnnnnnnnnnnnnnnnnttaagcgcgccggtgttcagaaggaggttatcgatgtcctcaatcgttaagcgttgcagcgtggcggcggtgctgctgctggccgtgctgctgcccgatttttcacagttgggcacctcgctaggtgggctggagttgattgcccacctggaagggtgccgcctgagtccgtaccagtgcagcgctggcgtgtggacgagcggcattggccacactgccggggttaaaccggggcaggccatcagcgagcgcgatgccgctgtcaatctggtggcagatgttatgcaggttgaacgcaggctcgcgcaatgtatgccagtggccatgccgcagccggtttacgacgcggtggtcagctttgcctttaacgtcggcacgggggccgcgtgcaagtccacactggcgcatttcatcaatcagcagcaatggccgcaggcgtgcaatcagctcccgcgttgggtgtacgtcaatggcgtgaagtctgccgggctggccaaccggcgcgccagtgagcgcacgctgtgcatgacgggggcgcaatgaaaacgctgattaccttgctggtgctggctgtcgcgatggtgtggtgggtggggcgggaaaaccgcgaactgacgcgctcactgtccgacgcaaccaagactatcggcaagcagaaaaaagcgctgcaatcctcgcagaaagcgcttacagaactggaggcccgcacccgcagcaacgagcaggcgcaagtgctattgcttgagcaacgtgacgccgccgaggcattgtccagccgccgcaaccaaaccatcacgaggctcctcaa

SEQ ID NO: 350 - DNA, 5330 bp, unknown
  Altogen  635822 strain
  misc_feature (4631)..(4676): n is a, c, g, or t
  misc_feature (5207)..(5288): n is a, c, g, or t
gggggcacattactcggctatcccgaattatctcttcattggtaaatgattaaatataaccgggttcccacctggaaatattcatgaaatttttagttccaaaccggccaggctaattcatacatatcattaatgctgatagattttatataactcagacttctgcaagagtcgagataatgtaattatcatattgttatgatttacaagggtatttttaatagcccatgaggactgcggttattagctaacaagaaattacaagtgaataaaaacaaataatagccatgcgcggtggatcgagtagactagatgataatttgttccgtcagagtatttaaatcatgtctactgaaagcgcgtctttaaaacatcacaatacttttgcgctcccggtcaatgcagcgcatttagtcattgctgaagaaattgaaatgatgattaaagcttggcagcaggcgcaaaagcgccaagagccactgctggtactcggtgaagggagcaacgtcctgttcctggaggattttgccggtacggtcatgattaaccagttaaaaggtatcacggtcagggaagagcaggacgcctggcatctgcatgtcagcgccggagagaactggcactatctggttagccagatgctcgagcgtggcatccctgggctggaaaatctggccttgatcccaggtttagtcggttcggccccgatccagaatatcggggcgtacggcattgagcttaaacaggtctgtgaatatgtcgacctgctgaacctgactacgggcgaaatcgatcgtatggatcctgaacgctgccagtttggttaccgggaaagcgtttttaagcatgagcttaagcaaggcttcgtgattgtggccgtgggtttacggcttagcaaacagtggagcccgctgctgaactacggcgaccttgccaagctggatcccaagacggtaacgccgcagcaggtatttgatgcggtatgcgccatgcggcgcagcaagctgccggatccacgtattaccggcaatgcaggcagcttctttaaaaacccactggtgagcggggaagtcgctaaaacgttattagcccaatatccagcaatgccacattatccgcagccggacgggcaagaaaagctggctgccggttggctgatcgatgagtgttcactcaaggggcatcagatcggtggcgcagctgtgcaccgtcagcaggccttggtattggtaaatgccgataatgccagcagccaggatgtggttgctctggccaggcacgtgcgcaatacggtagcgaagaaattcgatgtctggttagagccagaggtacgttttatgggcgctactggtgagctggatgccgtagaggtcatttcatgagagacaccactgtaccactgaagatcatctccctactggcggacggagagttccactctggcgaacatttgggtgagtcattgggaatgagccgcgcagcgattaacaagcatattcagaccatccgggagtgggggttggatgtgttcacggttccgggaaaaggctatagcctgcctgcggcgatcaacttgctggatgctgagcgtattcttggtttactggaagacaagcgggtcacggtgttgcccgtcgttgattcaaccaaccagtatctgttggacaggcttgcagaattgacttccggtgacgcctgtatagccgagtaccagcaggcagggcgtgggcggcgtgggcggcagtggatttcgcctttcggggccaacctatatttatccatgttctggcgtcttgaacaagggcctgcggccgcgatggggttgagcctggttattggcatcgtgatggcagaagtgttgcagcgtctcggtgcagatcaggtccgtgtgaagtggcccaatgatttataccttaacgatcgcaagttggccggtattctggttgagctgaccggtaaaaccggggatgcagcccagttggtgctgggagctggtatcaacatggcgatgcgtgaaaccaacgctagtcagattgatcagcgctggatcaacctacaggaagccgggatcactatcgatcgtaatgaactggccgccaaattgcttaatgagttacgcaattcattacggcaatttgaaatagacgggttagctccctttatttcacgttggcgtaaattagataactttatcgatcgcccagttaagctattaattggtgaacaacagattttcggtattgcccgcggtattgatcagcagggtgcattactgcttgagcaagagggggtaataaaaccctttattggtggtgaaatatctttgcggagtgctgaataagctaaaataagagaggccactggcctctctttcgctatctattatttccgtaaccgtacactttccactgcgtgattggcgctcttagtcataatcaagctggccctctcgcgagtgggtaagatattttgctgtaaattcagaccattaatctcattccacagctgggtggcgatgttgatcgcctccgtttccggcaactgcgcatagctatggaaataggagtctggattagagaacgcaccctgacggaatttcaggaagcggttgatataccagctttgcaatagatcgccaggggcatcgacatagatggagaaatcaacaaagtcggaaacaaatacccggtgaggatcgtgtggatagtccatcccgctttgcaaaacattcaatccttccaggatcagaatatcaggctgttcgataactttattgccttcaggcacgacgtcatagatcagatgagagtaaaccggggcagtaacacgtttggcaccggatttaacttccgaaacgaatttcaccaggctatgcatatcgtaggattgcgggaatcctttcttcttcatcaggccgcgctcgttcagcaccttgttcgggtgcagaaagccgtctgtggtgatcagctccacgctacgatgttccggccagcggctcaacaacgcctgcaacaaacgcgccgtggtacttttacccaccgctacgctgccagcaatgccgatcacataaggaatgcgttggccatctgtgccaaggaattgctccagaactgcctggcgacgcaggttagaactgatatagaagttcagcaaccgtgagagcggcaagtagatctgcgcgacttcttccaaggagagatcttcgttaatccctttgagtttaacaatctcttcttccgacagcgtcagcggcaccgaatcccgtaacgcggcccactggctgcgatcgaactgaaggtaaggcgtcgctaaagattgatctctttttatcataagccaaattctgcctgttaacgcaggttgggaaaggcgctggacgccaactccagataataatcaaactgcatattatagacagctggcttttaggcgtagacttttttcgcatttgtggtcgattagtggcagtttttaccaatagtgcgaacaggtacgcaattgataaagggcttgttgcagggcggtatcactgggtaatgataccgttttcaggtcagcttgcggcggcgcgagagggttgctgaacggcaaacagccgcttgtagtaaatcgccgtagggtggtaatacccgtcgggagccgcggcgtaatcgggtatctccccgaggcagcggtagcccaacgagcgatacagcgcttcggctgcagagccggcctgggtgtccagataaagcaggccacggtggatctcaagcgccattttttccagcgttttcatcaacgcccggccaacgccattgcgacgggcgcggctgtgcaccagcagtttttgtacttcggcccggttgcggccgttgggcttctgacacagggccagttgggctgtgccaatgacaccgctttcatctctggcaatccacaatagcaactctcctttggccaatgctgggcgcaggctatggaagtagctctcggcatcttcgtggggaatttgcgtgtcgtaacctactgaagccccgtgagtgaccgcatcggtgagcaactgcgccagctcggcgcggtaaatgggaagcgttgccgcattgatcaggacaattttcatcggtcatacctccttgcaattagggataatgaagataagcaataagcgggccaatgcggctaacctgtgcgggggctgttagtccagggacgaaagcgggatatcggcaccatcggagagcaccgtcctctttgtggtgcactaccccgatagccgctttcaaccgataggctatccttgattgagcgatacgacaaagtgcagggaaagcctcagcaggataggtctaaaatagtttagagtaatgcccataattgatgaaattttgcgcctcaacggtaaaaaattgcgagccggatgcagaaatcggctgatttatgagcgatagggcttagatcgcaatttttttgttgcataggccgtcagctctacctagaatgcgctgcacttgatgccggcttagctcagtaggtagagcaactgactcgtaatcagtaggtcaccagttcgattccggtagccggcaccattcaagtataaagtggtcaatacagtagttaaaatctggtggggttcccgagcggccaannnnnnnnnnnnnnnnnnnnnnnnnnnnnnnnnnnnnnnnnnnnnnattagacccgaggtactgggtcacaccgagcggtaatgctgaatcaagcgccggtcggggaaggtgaaaaccttcaaacagttcgcgccgcgtaacggaagttgctggcacgaagggtgaagagttaagcgacgaacaatccttctctccacctttaaagtctacagaaaagtcaggtagccgagttccaggatgcgggcatcgtataatggctattacctcagccttccaagctgatgatgtgggttcgattcccactgcccgctccaagatgtgctgatatagctcagttggtagagcgcacccttggtaagggtgaggtcggcagttcgaatctgcctatcagcaccacttcttaatttctcgccccctgattttctttctgtttcctgaattcaacaagcaaatgcttggttgatgtggtgataccaccgatttatccgtgtcttagagggacaatcgatgtctaaagaaaaatttgaacgttcaaaaccgcacgttaacgtcggtactatcggccacgttgaccannnnnnnnnnnnnnnnnnnnnnnnnnnnnnnnnnnnnnnnnnnnnnnnnnnnnnnnnnnnnnnnnnnnnnnnnnnnnnnnnncaacgcgccagaagagaaggctcgtggtatcaccatcaacac

SEQ ID NO: 351 - DNA, 19856 bp, unknown
  Altogen  635822 strain
  misc_feature (17135)..(17144): n is a, c, g, or t
ggaagagcaccgtaagcgggtagagaagggcactgccagcgtgttggttgggttacagtcatttgccgaaggcttggatctgaaaggtgaactgctgacccaggtgcatatccacaagattgccttcccgccgatcgacagcccggtgatcctcaccgagggcgaatggcttaaatccctcaatcgttacccgtttgaggtgcagagtttgccaagcgcgtcgtttaacctgatccaacaggtaggtcgtctgatccgtagcaacgagtgtcacggtgaaattgtgatttatgaccgccgcctgttgaccaagagctacggttcacgtttgttggcagcgctaccggtgttcccgatcgaacagcgcgaggtgccggaagcggacaaagcccataaggcggcgttaaaatctgcggcagaggccaccaagaaagagaaaaagcgcaagaatccgtttgctcgccgccgtacccgctaacaaatgtattctggcaaaaaacaactttctaactactattgaggcttgctcttcaaccccgttgctcaggtgaattatggtggaaatatctacgttgttgttattcgctggtgcctgtctggcactgacggtgactcctggcccggacatgttgttgatagcttcccgaagcctaagccaggggaaatgtgctggcttcgcttcgttggccgggatacagctgggaacctattgccacgccttggcggcggcgctgggcctttcacagctgtttgtcgcgctgccgctggcctatgatgcagtacgtttgttaggggcggcctatttactgtatctggcatggaaaacgctgcgttcaggcagtagtttgcaggcctccgccgggttacaggccgtttcagtaaggcgaatttttcagcagggcttgttgaccaatattctcaatccgaaaatggcgctgtttgtgttggcgctattcccgcagtttatcaatccgcagagtggttccgtggtggctcagatgctgattctggccactatcttgaatgctattggtctggtgattaacggtgccgtgatcctggtggtaaaccgtttaaaaagccgctttactggccgccaattcagcgcttgttggccgaattatttgttggcaggggtatttgccgggttggcttgcaagcttattttcgacagtcggaaataagcttcagagcattgcctcaaaggcggcactggctgggcaatcaggctgtgcactgtacatgaccaaccgcaggtggttgtcttcatcgacaataaacgaggcgtgttcaaacgtcacttcgcctgctcctgcaaccaggaaagtgcgttgcccctggcagcggccatgaatatcgtgccgttgccacagctggcgaaattggggggacacatcgctcagagcctgaatgcgttgcaacatggtggcatcttgcggggcgcgggcgtaatcacggcgaaagctggccagaatttgtggggcctgctccagccatcccatcagccgctgattgagttcgggatcggcaaacaacatccacagcatattgcgctgttctggctgacgctcagcgatagtaaacaggcggtctgccgccgagttccaagcgataatatcccaactcaggttcattacataggccgggcgtagggtgagatcgtccagcaagcggcgtaccaagggagtaacctggcaccattgatggcctgctaccaccggtggccgctgatgcgccagtaaaaacagatgatagcgttcggtcacatccagcttcagaacccgcgccagatcatcaagaaactctaccgaagcgttgatttcccgcccctgttccagccaggtgtaccaagtcaggcctacgccagctaatgcggcaacttcttcacgccttaaccctggcgtgcgccgccgcgtaccgctcggaagtccaacggcctggggggagagtttttcacgcttcatacgcagaaagtctgccaactcttggcgggttcggttaagggtacgtggtggcatcgtgggtcctgttactctcaataatagtataactggctatatagtaacactttaaagcatgttccatactgccgccatcatgatatcagggggcgttatggaacagagtttgtctgacagtaaggctggattaccagggctgccggtgttgctacttggtgggttcgtcaccatgttcgatttgtttgtggttaacgtggcggtgccggtgatccagcagcagttcaacgccagctttgccggggttgggttgattatcgccggttatgaactggcttttggtattttactgattgccggtgggcgattgggggatcgtttcggtcggcggcgtatgtttagctacggtatgttgtcttttgcgttgacctcgatgctttgcggtttggcggggtcgctgtgggtcctgattgttgcccggtttttgcaaggtgcagcggcagcgctgctgtttccgcaaatttatgccttattgcgtgtgctatatggcgaagagcagcggcggcgagcctttgctcgtttggggatgacgcttgggttggcggcgatttgtggccaggtgttgggcggtttgattatcgaggccaatattctgggcagcagttggcgcatgatctttctgatcaacctgccgattggcgtgctggcggcgttggcggcgcgacgcattcctgagtccagactggcgcaggcccagcgactcgatgctaaaggtctgctgctggccgctggcggtttgctgctgttactgttcccgttactggaaggcccatcgcgtcactggccttggtggattgcgccgatgatggtgctggcagtggggctgtcagcttggtttgtgcgttgggaacggcaacttgcccgtcactccggtgatgcggtgctcgatctggccctatttcgccaaggtcactttgcccgcggcacggtaattgtgctggcgatttactccaccgcatcctcattcttcctctgttttgccctactgttacaggccggaatagggctgacgccgttccaggcgggttgcctgttcgctccggccagcgccgcctttatgctggcctcctttttggctccgggctgggtgcaacgctgggggaatattgtgttggctggtggggtggtggtctacgccagtggcatgatattgctggtggtgcaggtgctatggggacgtgcgttcagccatccgttacaactgttacccggcctgatgattttgggttttggtcaggcattgagtatgacgccattgcttaattgggtgcttggcctggcgaaggagcatcaggcaggtatggcagcaggcttggtgtctacggtgcagcaggtaggcggtgctctggggatagcggccagcggcatgttctttgttccgctgctggccgggggggcagagccacagcactatgccagagcctttgctggtgctatgggctataacctgttggcgatgctggttgctttggtcctgctgctccttacccaccggcagttaggcaggggctgttaacgcattattgcgccggtttgcccggcgctgcgttactatttaccagcctccaccgccgccgccgccggaacccccacccgatgagccaccgccggacgatccagaaccgctggagctggagcctgatgaacttgaaccggagcttgaactgctgctgggtgtcgccatagacgatgcggtacaggaacgactaaagcgattcacgcgctgccagtctgcgtcgacaaaggcttccgacatagccccggatttactgaggtattcggcaaaggtattggcccaggtcttacccacgccgagcgctagcgccgccggtaacaggctttcaaaatgggcaaccaattgatcgggtgggtaaagtgcctgatagcgatttctctcggccgtacccagatacagtttcagcccttgcgcagtggccaaatcattcagcccccgttgggtgtatcgcgggatcatccagccaaaagccatgcatagcagaatggcggccagcagcgcgccaatatacccggctggaaactgcgtcaggggcaacatgccaaataagaaagcgccaccgccaaaggtggttaacgggccaaatagaagagcaataaccaaggggatgaacccaaaagtattccaggtttttctcgggctcaataaaaatctcaacggtaaagagagcagcaagatcccaaacagcaggaaaatcagggcaggaatggtgattactgccgcgccgagattaaacaacgccccgcagatcaccgggatcagcagcatgatatagactgcgcggcgcaccggtttaccccatttgttgaataatttctcacgctggtcctcactgcgtttttccaaccatttacgagcattttgcattggtcgctgataggccaggccgaggttgatatttttgcgactgccgctaaacagcaggccaagtaactgcttatcgctggtggtcaagcgcttgttattgtcatctggttggtacgataaccattgttcatccgccgattgaaacctggaaaaccacgggcctgtggatttgctcgctttaagcgtgatcgctgcgccacgtttggcgaccagctccagcaaatcgctgctgaaagccacgtcgtcgtacttacgctgggtaataaaccgcagatagcctggcgacagggtggtaggcatcgtatatagcggcacaaccggcggcatcttcaagccaattgcggtcacgttgttacgccaccaccacaaacaatagaccgcgagcagcagcacaggtatccagatcgcactggttgccagcgtgggtaacagcaggtgcaccaacggtgaagatgcttgcggggcagcggcacccgccagaatatcgcgtggccaggtgtagacaacggtcagtccttcgccgtggtccagcggttgcgtggtttgcactcctccgtcgggaagtatgctggcgttgtgctcttttgcgcccagcgttccggtatagacatcgatggaacgcagccgggagtctctaccttcgttatccagatagttactggcgtccggcagctccagttggaagctggccttggtgattggataggcccaatcgttccccgtgacgttccagtagagttcgtcccactcggggaaacggctgaagtggttactgacctgatagcggatctggtagttataaatcgccggttgcaagatgtgctcggcactaccaatacgcactgtcagcgtctttgatgttttatccaggctatagggttcggcaacgccgtcgcgcaatacttctttgatctgataatcgacgctgaaaatcttgccgtcctggcggttccaggtgagcggcagggtgcggaaaatcccacggcgtatctcttgccctaaagacagcaccttgatgttttcccgcatttccatgctgccgtctgggttaaagtgcgcatgggtatcaaatgagagaatatgctcataggcacgtacccaacggggagcacttgctggcacagcctctctgtcgggagcctcggcaacgggggctgccccaacggcgatatcatcagccgtagccggcgcggctgctgtcatcaatagcgataacacccataatacgcgcactaacaaacctgatattgcagccatcgtgctagtccatccgtggaactttagcttcctcgggatcttcgagttcgaagaacgcatccgctttaaaattaaacagccgggccaggattaaactggggaacgactccaccagaatattgaaatcgcgcaccgtaccgttgaaatagcggcgtgccatttgcagttgttcttcgatctctgccagagattgttgcagggagagaaagttttggttggctttcagttccgggtaggcttctgccagcgcaaaaatgcggctcaaagcaccagaaaactctttttcactctcggcaacctgaggggtgttgccaaccaggtcgctgcgctggcgcgagagggtttcaaacagctctttctcatgcagagtgtagcgcttcaccagggtcaacaggttgggggccagatcgtggcggcgtttgagctgcaccgctataccgctccaggcttcgtctttgaaacggcgcagggagataaagcggttataagtcatcacggaccagatcagcaccacggcgatcgcggccagagtgagatagatttccatttttcattccatgtttgatggggaatacatcattccattgtatgtttatggatactatcttattccgctagggtgggtaaatctcgctatgtccagcaagccccaatccacaaggaaaacctaagccatgtatcaactagagtcattccgtgaagacgatttagacgcccagatagccttggtgcgcgccaatcctctggggctgatcgttagccaggggccacagggtttggtagcagatccgatcccctttcttattgataccgatgatcaagggcaggtgacgctcagggcgcatctgtcgcgaggcaacccacattggtcgttgctgcaagccgggcaagaatgcctggtggtgtttcagggggctgagggctatatctcgccgggatggtatgaaaccaagcggcgcaccggcaaagccgtgccgacctggaactatgctgccgtccacctgtgggggacgccaacggtcacgcaagatagcgcttggctgcgccaactgctaacggaactgacggcggtgcatgaaggcaatcagccgcaaccttggcgtgttgacgatgcgccagcggagtatattgccgccaatatcaaaggcattgtcggcatcgaaatcgccgtcacccggcgtgaagggaaatggaaaatgagccagaaccgcagcgctgccgatatcgacggggtgattgacggcctgcgagccggtgacgattgccaacagcaacttgccgatgaggttgagcgccgtcgcggataaggtatgcttattgcaaaccgaatcagcggagcgagcgatggattacagcaaaattatcaaagaaataggccgtggcaagaaccatgcgcgcgatctggatcggcaaacggcttttgagctctatcaggcgatgctgtccgatgccgtgccacctctggagttgggagccatcctgatcgccatgagaatcaagggggaagccgaggaggagatgcttggcttctatcaggcgatgcaacagcaggtcatgcggctgcaacccccgaaggggcgcccgatgccggtggtgctacccagttacaacggcgctcgtaaacaggccaacctgacgccgttactggcattgttgttggccaaagttgggctaccggtagtagttcacggcgtagtgaacgacagcacgcgcgtcaccagcgcagagattttccgtgaacttggggtgcagtggtctgaagatcctcaggccgctcaacggcgtttggacggcggaaatgcggtgtttatcccggtgtcggcgcttgcgccagcgttggaaaatcagcttggtttgcgctggagaatgggcgtgcgtaacagcgcccacacgctggcaaaattggcgacgccgtttggtgagcaggacgtgctgcgcatcgccagcgtttctcatccggaatacgtcgagcgtgttgcctcatttttctgccagatcggtgcgcggggattattgatgcatggcaccgaaggggaggcttacgccaatccgcaacgctgtccaaaaatccactatatcgtcgggggtcagcagcagattttgttggaacggccagaacaggatgcgttagctgaggtgcctgccgccaaggacgccgcaacaacggcgcgatggacggaacgctgtctggctggtgaggtcgccattcccgagccgatcgctcggcaggttgcctgctgcctggtcgctaccggccaagtggagacattggagcaggggctgatcaggctgcgatagtctgccttattaccttctattatcaggggcgaatacctttgccccaagtatttatcactgttgtgttggttatttttagtaaaaaaaatctcaattaccagactatatattactaaccactttaattatggcataagttggtgggttatgtgataagacggggtaaaagcgtttaaaactcagtgtataactttaaagaagtagattacactcagcccatcagctttggggtcttgcatgattttccatcgattgcggaggtttgctccgtcttggttgtaaaaaaggacttgtaagctactctatctaaaccataagaagagaagcgcttaaaatacatagacggttttccattgtgtatttgggttatagatcacgttattttacattcgtgatttgtatgtattcatacagtgccaagtgtaagcttataggtctggattatgagtaaatatgatgatgtccaaggattcaaagataagaccaatctcaaagggcttgattataaagaatttcctcgtgcagatgtggcatcggcctcacaacgctggtctattgttgaacaggtagcaggcaatggtggtattactgccagcagctcgcagccaacgccgatcaatagtacggatctctcttccagtgcacctttagggttcgaaccgcctgcacaacccaaggcggtgataacagaaaataccgccttgcccggccacattcctcataattttgatcgttttgctccgccggtggagcctaaactcactaaaaccgcccagccggaaagcccgcgtgacgttcttgctcagggtaacccttttcattcccctgcaagcgctccgccgtccgctccgcaaccagagaaccaacgttttaagcagatgttcagcaagaaaacgtcctctgccggtgaagtgatggacgctggtcgtaatacattactcaaaccacttttagagtctattgcctcatgccgttagtctgtgtttgttctccgaaaggaggggtagggaaaaccacggttactgctaatctggcttatgcattggcccgtagcggcagtaaggtgttggttgtcgacttcgacacgcagaatgcgttaaggctgcattttggcgtgcctattgccgataaccgaggttttgttgcccagtcggcaattttatccgattggagtcagtttattcttaaagttgggccgaacctgttcgttttaccttacggcgacgtcactgatgagcagcgccttcagttcgatgacaatctgctcaatgagccaatgttcattcaacgtggcctgagttcggtgctgaagatcccaggcatggtggtgatcgccgatatgccgccggggcgcaatgcggcagtgcaggccatgcaggccgctgcggacatgcgcattatggtattgctggccgataccgcatcgctcagtttattacccactattgagcagcataagtttatgagtgcgcctgccagcaatgaagttggcgagtattatgtggtaaaccagagtgacatgcggcgtacgttgagcagggacgtgacgcaattcttcgaacatcggttgcaagacaaactgctaggaaccattcaccgcgatgagtgtgtcccagaggccaacgcatcgcaacgggcgatcatggatattagcccggtgtcggctgctgcatttgatattgagcagatcagtaaaaaggtcgcagtaattttagggcttagtgttggagatggtacgtatcatcatactacgtctatttatggctcttcgtaaggattgtctggttagttatgaataaaatactcttttatttcttactgctgttggccttaccttttatgctgttgattatcattgcccccatgagcagtgataatcagtatatctttggcctgatctgcatagcgatcgtgtttattttaggggtgagtaaaagcaaaaaagttaccctggtaatgattgtgatgtcgaccctgatgtcattacgttacatctactggcgcgcgacagaaaccctgcatttcaacagtaccctggaggcggtgttgggtattgccctgtttatcaccgagctgtatgccctggtgatattgctgtttggttatattcagactacctggtcattaaaacgcactattgaaccgctgcccgacgacacgtcgctatggccaacggtagatgtctatattcctacttacaacgaaagtatggacgtggtgcgcgacaccatcctggcggcgcagtgcattgactacccgaaagacaagatgaaaatctacgtgctggatgacggcaaacgtaatgagtttgccgtattctgtgccgatgcgggcgtaggctatattacccgcaacaataaccaccatgccaaagcgggcaatctgaataacgcgatgaaagtgactcagggtgaattgatcaccgtgtttgactgcgatcacgtggcaacccgcgccttcttgcaggcgacggtcggcagcttcctggtggatgagcgcctggcgttgatccagaccccgcactatttctattcgccggatccgtttgaacgcaacctgtcagaggcgagcaaagtccctaacgaaggcgcactgttctatgggccggtgcaacagggtaatgataactggaatgccaccttcttctgcggctcctgtgccgtgatccgccgttcggcgctggaggaggtgggcggttttgcggtagaaaccgtgaccgaagatgcccacaccgccttgaagatgcagcgtcgaggctggaacacggcattcctggcgttgccattggccgccgggctggccaccgaacgcttggggctgcacgtgatccaacgtacccgctgggcgcgcggtatgacgcagatcttccgggtggataatcccttgttggggcgcggcctgacctggcagcagcgtttatgctatctgaacgccatgctgcatttccagtacggcttacccagggtgatattctgcgtggcaccgctggtttatctgctgttcaacctcaatatcatcgcctcctccgccgggctgattttcgcctatgtgttaccgcatctggtgatgtcgatctatatcaactccagagccaacggacgctatcgctattcgttctggggggaaatctatgagacggtgatgtgtttccacctggtgataccgaccctgttgacgatgatctcgccaaaacacggcaagtttaacgtgacggataaaggcgcgttgctggatgttaactatttcgactcccatattgtccggccgcatattatcgccgtgtccttgctgctaatcggtaccgcctggggcgtgatccgcctggtgatgccggatcactatggtgctaacccgcaggttatttggcttaatattgcctgggccagtttcagcatgattatcctgctggccgccattgccgtagcgcgggaaactcgccaggtgcgaaaaaccatccgtatcgatgcctccttgcctgcagtgctgtactttgccagtggcgcggcgatgcgtaccgaaaccctggatctttcgatgggtggggtcaaattgaaaacgccggacgagcgcttcctcaacgatccgatcgaagaggtggaaatatcgctcaagtctggggccgtctgtttcccagtagagttgatcgatgtcgacaagtcggtgacccggttaatgttcaaagagatgccgattgagaaacgacgggagctggtgcgggtagtattggcgcgggcagatgcctggatccagaccaaacctttcccacaggatcggccactgcgttcgttgttgggcgtcctgcgctgtattttcgagtttttctatttttcctggcgcgatcgtcgggccaaaaagcagcagaagcggcctgaactaaagcgggataaggaacaagccctatgagccgggtgaaaaccaagttgccaacaggccgatctacgctcattgctctggtcagcggcctgatgttggggatggggctttctggtcttgcccttgcagccgatccgcagcctgcgccgtcacatgccagcgatggtgtcgagatgccaggttttccaaccttgccgcgtccaacagatgctcccccagcgggtgcagtgccgggcagtgttgagcaaactgctccgcttgatatcgctacgccaccggttaccgtcttcaatcagtcgctcgcttccacgctcagcgtgggcgatatggggcaaaccacaggattgacgttgagcaactggcaacagcagtccggcttcacctttactttaccctcggactgggtggtaacggacggcaatctggtgctggatctcgacatttccccggccctgataggaaccgataccgagctgcaactgatgctcaatgggcaacccttgagcacccagaagctgaatcaattgcatgaaggcaaggtcagtttgcaggtaccgatcccggccgccatgatcgtagcgcgcaacaacctgagtttcagcattggcaatggcagcaatgcggccatgctgtgcgaaaagggggcggccaataaatattggctcaaggtgctgccaaccagccagttacatctggaaaaccaggtgctgaatatcagcccgaacctcggccgtttccccaatccgttctttgatcctcagaccatgcaacccaccttggtggacgtgatcttcggccaggaaaaacggccggaagacgtggtagcctccgctatcgtcagctcttatctggggaaggtcacgcgccataataacttgaactttcaggtattgcaggatagcttgcccgaacagaacggcattatctttgcgcgccccggcgagcagattggccagttgactctgccacaggccgatggcccgaccattcagatgattgataatccgctgaacccggtttacaagctgttgctggtgatggggcgtaacgccaccgagatgcgccaggcagcctatcgtctggtcagccagccgttgccggagaaaaccgcgttgctggcggtgaagccggtgactattccgctgcgccagccctacgacgccccgcgctggatcgataccagcaagccggtcagctttgacaagctggtggccagtaatgaggaactgaccgtcaccggcgtttaccatgacgcggtgcgcgttgctttccgtgccgccccggacctgtttatgtgggatggcagaaacgtcccgctgcaaatcaactaccgtttccccaccgacaactggatcgatgagaataaatcccagctcagtgccacgctgaacggcaccttcctgcgtaacctttcggtgaacaagcgcggattgctggaactgctgtggcaccagtttggcggcgatattcgccaggaacaatacgccttggccctgccaccgtatctgatttacggcgacaacatgctggagctttatttttctatcgtgccgaaaaacggcgcttcctgcgatccgacggatagcaacactctcaagagccatatcgggcccaactcgtatattgatctgagcgatacctatcatttcaccgagttgcctaacctctcttatttcgttggggcctccttcccattctccaagctggcggacttctcgcaaaccgtgctgttaatggcggaaaaacccacggacaacgaagtccgcgcgctgttgaacctgaccgctcgctcaggcgcggctaccggcagctcgattggcaatgtggatatccgctttggcctacgaggcaacgagaacgagttggacgacttcaagggcaaggatgtgctggtggtcgcctcactggctcagagcactttctatcagcggctgttgcaacaggtgccttttacgctaaacgatagcggcgggttggcggtcaaggcgcagtctacgttggaaaaactgcagtcctacctgaaaggtaactggcggacccaaggcatcgatgccgatcgttatctctcctcattgacggactggcgtggatttttcagtttccggtccagttgggatccgcaacgggtggtggtggtggccagcgcctcttctgacgatgacctgaacaagatctatggcgatctgaaattggcccagatcaacgccggagtgcgtggcgatctggcggtgatcaccgatcagaacggcgtacgcagcttccaggttggcgaacagttcccgagtggggagctgccctggtatctgatctttatctggtatgccagtaaacatgtggtgcttttatccctgaccgtgttggggatttccgtggtgttggggctggggctgtatattttgctacgcaagcacgccaccaaacgcctggggagagatgcagaagatgaaagttaaaacacgtctcgaccagaagctagacaggagccgccaatgaacctattgctgaaaaagaaattgtattgggtctctctggctgggctgacgattttttcggtgtcggcgttggcggatgacaataaccccgcgctgaaagccctgtttcaacaggcggcttactggcatgacaaatcgcatgacgaactggcccagggggcgttgcagaaagtcctgctgatcgacgagaacaacgccgaggcgatgtatctgctatctctgtatgccatgcagagcggggataaggccaaggccgaaatctggcgtaaaaaactgagcgctatcgcgcccaatgatcctcgcctccaggcgttgagcagcaccgaagcggctccgtcggtctccaaaagtctgttggcgcaggcccggcagttggcggcgaaaggggagtttgcccaggcggctgcggcttatcagacggtgttcaacggcaagacaccgatcgatagccttgccaatgagtattacctcactttggcaggttcacctgcgggcaggcaggaggcgattgatggcctcaagcagcggctggctatgcaacccaatgacacgcaaacccgcgtggtgctgggcaaggtgctgacctatcaggaatcgacccgtcgtgaggggatcgatatgttggcggcgatggctccgaacaataatgaggccgatcaggcgttgaaacaggcgctgctgtggttggcaccgcaaccggctgacaagccgctgtatgatgcctatcagcaacggcatccggcggacaaggccgtggcggcctattatcagcagaatattgccggctcggccaaaggcgttggcttctccgaactgaataaaggggatctgggcagcgccaaggatcagtttgccgctatcttggccagcaacccgaatgatgcggatgccctggccgggatgggatttacggcgatgcgcagcggaaacttcgcgcaggcagaaaactacctcacccaggcggcaaaacagggcggcccacagagtgcgcagtggggggcgttggctcaggaagcggcgttttacgcgacattggacaaagccaagcaggctgccaacgcaggccaattggatgaagccttggcgatcagtgcgcccctgagccgtgctacaggggataaaggcaacgcggcgacgctgttccgggccgatctggctcgtaagaaaggggatttcactgcctccgagcagatgtatcgcggcttgctggcgcaaaatccgcagaataatgatgccaggctggggctgtattatttgttgcagcaacagcgtgacaaaggcccgcaggctgcgcagatactgcaaactatcccagccgatcaacggcctaaagtccagcaggcggtggcgggggtgaatgttgatcctcagcgcaggcaggccgaggccgccatgcagaatggcgatccgcagcgtgcgatgatgatcttgcaacaggcgctggaaaagcagccttcgaacgtttgggtacggctggatatggcacgcatcctgaacaaacaggggcaagagttgcaggcgcaaaccttgatctctccgctgatgcaggttggtgcttcgccagatagcctgtacgcggcagcgctgtttgcttcagaacgtaacgactggctgaacgtttccaccctgatggcgcgtatcccgcaagggaggcagaacagcagcatgcgggctctggtggccactgcgtcggccaaccagcagcgggccagtgcagaaagttatcttcgccagggtaacacggccagcgcggcggtcatcttgcggcagttggcgcagaagcctccgactgaacccgcggcccttggggagctggcaaaagatttgatgacggtgggggatacctcaacggcggtccaactggtgcgtgacaacatgcgtttgggagtcaaaggcaatgcgggggattacgcggcccagatagcggtgctcaatcaggccgggttaagccaggaagccgatgcctggctgaataacccggcgttgcgggcgcgcagttcaacccgcgagattggccaactgcgcaacggcagcgtgatcaatgaggcggataaactgcgtttgcaggggcagtatagcgccgcgtatgacaagctgatcggcgcgttgcaaaacgatccgcaaaataccgatatcatgctggcgatgggacgtctctatcagtctggcaatatgaacaaagaggccgggcaggtttacaactacctgctcagccgtgacagcctgaaccaaggggcgcgcgaaggcgccgttggggtcgcattgtccgatggcgatgtcgatcgggccaaacagttgctgcgcggcttgcctgcgcttaaaacgccggatcagttgctgctggcggcgcgcgtggctcaagcggacggtaactatccacaggcgatggtgtttctgcgcgaggcgaaaaaccgagtcaatggcgtaagcggtgcgccaggcggggggcctgcagtgattggcggtttgcggctggcggataatccgtttgccgcgcagagcacggcatcgtcgagcgtgaatacctcttcctcggcttacggtgaggtgctgccttggcaagttgcagccccaggttacgcgcgcgctcctgcggaggtagtgaaaaacccgaccttgcagcagattgataagctgatggacgaggtgcaggacaagaccgccacctgggttcaggggaatatttcattgcgtgataacagcagtggtgaaaacggcctgagtaatatcacggaagtgagaagcccaatcaccctgtcaggcatgccgttcgataatggcagggtcagggttgatgtgacaccggtgatgctnnnnnnnnnnctcagtgttgatgtgacaccggtgatgctgaaatccggtacaccatccgacagcgccaacagccgctttggtaccggggcgctgcaacaggccagggctatcgaggctgcgactcaggcctccgtcgttgcctctcagacctcgattgctgccgcacaggccgccgatctgcgttatcagcaactgcatgccacccgcgatagcctgtgttctattgacgccacttcgccagagtgtgccgctgccacggtggcgcaggatcaggcctataacgaaaggcagacgctggctggcctggtgacacagccgaagacctttggccctaacgatatctatgccgactcaccggggcagcagcaagataccggggtagaactggcgttggcactaagcggtgacagctataagctggacgtgggcagtacgccaatgggcagcggcatcagttcgatagtgggtggcgtgaaatggtcacccaagctgaccgaacactcaacgctggatatgacgcttgaacgtcgcgcggtaaaagatagcctgctctcctatgtcgggaccgaagataccatcaccggcaagaaatggggggcggtgaccaagaacggcggcggagtaaatcttggatacgatgatggcgtgctcggagcttacggtggcgcgggttattacagctacgtgggtgataacgtggcggataaccatagcgtgaccggcattctgggagcctacatccgcccttataaggatgatgatagcgagctgaaggtgggcgttaacgtcaactatatggattttgacaaaaacctcagttacttcagctacggtcaagggggctacttcagcccgcaggattatctcagcatctcgctgccggtggagtacaccaaaaagcaggataacttcacctatattctgagcggcaacgtgggttatcagacctataacaatcaggaaagcctgtattacccgaacgatccggctcttcagtctcagttggaaagcctggtcagccagggttacggcaaagaggccagatatgccagcgaggacaagagtggcattggctacagcctgaaggcgggggggacttataaggtcacgccaagcgtgttggttggggggcagttgggttatgacactttcggcagctattccgagagcacggctttgctctattttaaatatctgttagatggaaaataaccatgcaagatattaacactaccgggtatgagcttgattattatcgccagcgtcagtttaaggcgggttggcaggatctgatcgaagtggtgttctccggcattctggcttctgctgatgatgcggacagccgcgactttctgcgtttgatggggagtaacctggcgaagaagctgccattgccggaggcggaaacggtgggagagttggaggatgctctcaatgccttactacgtcagtttgactggggcagggtgcagattgaggccaatggcgaacagatgatcctgacccattatgcctacccgcacagtgccgatccggccaacgaagacgtctgggcactctcttttgccacggtgctcgagggggcctatgacgcctggctgctagctcagggcggtgaggcgcatgtttccctacgctggtgcagcccggccaaggataacaccctggtcttttgctatagaaacgagcaacgcaggtaaacgtgatggcgaaaagcaggtttggtaggctccgcgtactcctgctttggctggggttggtgttgtcccttggtgctcaggctgccgacagcggttgggcgcaatacaaacagcgttttctgttagctgacggacggattgccgataccggcaataacaacgtcagccataccgaagggcaagggtttgccatgctgttggcggtctacaatgacgaccgtcctgcgtttgacaatctttggcgatggacccacaacactttgtatcgccaggatatcggcctgttttcctggcgctatgaaccggggaaggcggtgccgatagccgataaaaacaatgccaccgatggcgatatcctaattgcctgggccttgttgaaggcggggaaacgctggagtgtgcccgcctatctcgcttcctcggcgcagatacagcaagctctgctcaaacataccgtcatcgactatgccggttatcgggtgatgttgcctggcgctagcggtttcaggcagaacggttcggtgatcgttaatccttcctattttgtctttcccgcctggcacgcattttaccaagaaagccatttgccggcgtggaaaaagcttatcgacgatagcatgaccatggtcagcagaatgcgctttggcaaacagcatctacccagcgactgggtcacactacaggccaatgggcaaatgactccggccagcgactgggcgccgcgatttggttttgatgcggtgcgggttccgctctatctctattgggacaaggccgacagcctgtcactaagcccctttgccagcttttggcgcggctttgatcgccgggcgacaccggcctggctggatgtgcttggcggccagcgcgccgagtataatcaaagcccgggaatgagggcggtcagggatctgacggtgggagatcgggggccgctgaaagatcgcttggcaccggatgaggattactactctgccagcctgcacctgctggcgtactgggcacagcgcagccagctcgt

SEQ ID NO: 352 - DNA, 822 bp, unknown
  Altogen  635822 strain
  misc_feature (537)..(576): n is a, c, g, or t
aatcgcccatctccgtaaattattgcacatgcccgcccgagagaatcctcaaaagaaaatgcaacgctctctgaatcttgggtgttaatcaatttagtgacttcattcagcgattctgagctcggatagctcacaccggtttgcggggccacgcctgcaacgttttgatactggtctgcaaatctcgggagaatagctcccacgggcacggcaacgttgaacatcgaatttagcgggatagtaccggctgtgatggcagcctgagctgcggcaaccgatggataaatatttgctgcaatcgtggcgttctgagcagactcggctgctgctgctgcggcagcggccgcttcacttactgcagtcgcagactctccggcagctccttgcgctacgcggctgaatttccatgctgcatccgctgacgcagccgcactatcggcattctggctgctggatgccgagtttgcagcatcctgaacacttctcgcacccagatccacactggtgccaactacgttgtttacgggtaatccttcnnnnnnnnnnnnnnnnnnnnnnnnnnnnnnnnnnnnnnnnaaaatagaggggtaattaaattacgggggtgtcgtttatggtggtaaattcagcgtcatcgtaaaacaatccgtcagcatcattaaaatacataccgggttgacaagagatatcagtctctatttttattaatttataaccaacaacagagaatttatcatcggcgacaattgtattttcgacgtaattggagtcgattttcagcatcgcatagttatctgtctgcatcaggaaaactcctcaata

SEQ ID NO: 353 - DNA, 251 bp, unknown
  Altogen  635822 strain
gcccagggtattccgccatggagggttaatcacagcaggctaatccgcatggatggcattacgttgccctatcagcaagcgctcacagaaaacgaatggggaatgtcagttgttgagcgcatcttcgatcgccttacatcgtatgacagcacaagtgttggcgctgcccagctcgcctataaagcacatttgcgtactgcgaagatcaagaaactccgtgagattatcgcgatgggcggtaagccatttga

SEQ ID NO: 354 - DNA, 380 bp, unknown
  Altogen  635822 strain
  misc_feature (295)..(330): n is a, c, g, or t
ggtgacggcctgcgccgtcagtaacgccttgatgccggtatattggccggtagcatttgcgccgccgataatattggacgtggtctcagccgcatctttgccctcagcgacgcgcacgaccaccgtgaccggtttgcactggtcggcgatggcctgtaacgcagcggccaacgtgccttttttaccggccttgcccaccgctgcctgcacatcggtgatcaataccgggacattgagcgggaacataactgggtcagcgtcgctggcggtacacaccatgccgacaatggcggtnnnnnnnnnnnnnnnnnnnnnnnnnnnnnnnnnnnntcacgccgtgatggtagtcactcattcagtttactccgtggttgtttggt

SEQ ID NO: 355 - DNA, 326 bp, unknown
  Altogen  635822 strain
  misc_feature (198)..(240): n is a, c, g, or t
aacgatcaactgatcagtaataccgatattgaattcaagtctcgggccgataaatcggtctatccctgcctgaccagcgacattattaaaaatattgcgttcaactacgaaaaactgcccgccgattttttgaaacagcagtctagcggcgccctatgcatggatctgcaaaataagcttcccgaagcccaggtgaannnnnnnnnnnnnnnnnnnnnnnnnnnnnnnnnnnnnnnnnnnctcaatattgcccggggtaccgtgagcccggaattatgggacagcggtatcccggcgttcctgtttggttacaacgttaatggcta

SEQ ID NO: 356 - DNA, 388 bp, unknown
  Altogen  635822 strain
  misc_feature (201)..(332): n is a, c, g, or t
tgtaagcgtgcagatctatgagcgcccatctcttacaaattcaaacggcgggctgacggttcgttgtttgagtctgctcacacattcatcctgctatgcccgttcaggttagttcggcctacacattcagcaatattgccacggtcattgagcgctgttttttcaggccgttacaatgcattgcgtggcactgcgcaaagnnnnnnnnnnnnnnnnnnnnnnnnnnnnnnnnnnnnnnnnnnnnnnnnnnnnnnnnnnnnnnnnnnnnnnnnnnnnnnnnnnnnnnnnnnnnnnnnnnnnnnnnnnnnnnnnnnnnnnnnnnnnnnnnnnnntccacaacgttaggttagcttcttactcgccgcgaggcaaggataaggaggcatga

SEQ ID NO: 357 - DNA, 14942 bp, unknown
  Altogen  635822 strain
gggggcacgttttctttgcttatctgaccgagatccttcatgcggcatactgataaaaattatacattgccttaacattccgttgtgtctgatactttgatcacaaatttccattattgaagacctatgaaccaaccaaccgaacacccgggccttagccctgcactgacactgttaatcgcgatggctaccggcctggcggttgccagcaactactacgcccagccgctgctggaaaccattgcacaaaactttaatctatcggttaaccaagccggatttatcgtcaccgctgcccagctaggctatgcggttggcctgctgtttctggtgccattgggcgatatgtttgaacgccgcgggctgatcgtctttatgacgctgttagccgccggaggcatgctgatcaccgcgtcctccagcaccttatcgatgatgatcctcggtacggctctcaccggtctgttctcggtggtggcccagcttttagtgccactcgccgccactttggcgcacccggcaaaacgcggtaaaaccgtcggtgtgatcatgagcggcctgctgctcggcattctgctggcacgtaccgtcgccggcgctttggcgaccctcggcggctggcgtaccatctactgggtggccagcgtattgatgatcctgatggccctgctgctgtggcgcgccttgccacgctataagctgcattccggcctgaattacccgcagttgctgaaatccatcttttccctgttctgcttcaccccgttgctgcgtacccgcgcgatcattggcgctttgtcgttcgccaacttcagcgtgctgtggacctcaatggctttcctgctggcttccccacctttcagctattccgagggcgtaattgggctatttggcctggtgggtgctgctggcgcactggctgcctcacgcgccggtcatctggccgataagggcaaagcgggactaaccaccagcgtcgggctggtactgctgttgctgtcctggatcccaattgcgttggcgccgtactctctctgggcgctgattatcggcattctggtgctggatctggcggtgcagggggtgcatgtcaccaaccaaagcgtgatttaccgcatcatgccggaggcgcgtaatcgcctgaccgccggttacatgaccagctattttattgggggtgccgtggggtcagtgctttccgctgccgcttatcaacatgctggttggaacggtgtagcggcgattggtggcgtattgtgcgtgctgaatctgctgacctggtggcgtggcaagcgccatgacccgcaagggccagccatcagctagttagcaagaaaataataacccttgaaatttattagaccgcagggtgtaaaaattacttacactctggtaatattgtcgcggtaaattattggcgacctatacaccctgcgccccggacctccatgaacgaccttactcacgtaagatttctttctatcccccccgcaggatgccgtagttctccgcccaatttcataaacaaaccttacctatctcagcctgcggaacggcagaatttgtgccttcaatcacaagaccttagggtctgtggcgttaagcatttacaaacaacttacaaatgacacgaattgctaaattattccccttgctgaagatttacattattaatcactatcgttactataccgaacgaaattaatgaggcactaaattatggaaagctcgtttacccccatagagcaaatgctgaatttccgcgccaaacgtcagaaagacttcccataccgggaaatcctgctgacccgcctgtgtatgcatatgcaaggcaagctgttggaaaatcgcaataaaatgctgaaagcacagggaattaacgaaaccttgtttatggctctcattacgctggatgcgcaggaaaaccacagtattcagccttctgagctaagctcagccctgggttcgtcacgcaccaatgctacccgcattgccgatgaactagagaaacgcgggtggatcgagcgccgggaaagcgatcacgatcgccgctgcctgcatctgcatatgacccaggctggggaagcgtttctcgaacaattgctgccaccgcagcataaatgtctgcactttctgtggtctacgctgaacgacgaggagcagcagcagcttgaaatgctgacgcgcaaattgttgacccgtttggatcagatggaagtttcagaacagttatcccaataattcctgttcaggtaatcattttatgcgatccccgttaaactggagattcaccccgctgttcgccgttctgttgctggcggggtgcgcatctaccgataatattgccccgcaatccaagatgatggatccgcaacagctgcagcttgcccagccgaaagtcagctcgctggccatcagcccgcaatggtggcgcacgcttaacgatccccagcttgatagcctgatgacccagacgctgcaaaactcgccttcgctgcaacaggcgggcgctcgcgtgcgtgaagcccaaagcgtggcgggggaagccagtgctgccaacggccctaatctggatctgaatgccagcatcaaccgtcagcgtctggcgcaaaacaccaacctgggctttggctatctgcccaacccggtgtatgagtccaccaactcgctgggtttgaatctggcttatgagtttgactggtggggcaaatatcgcaatcaggtcaatgcggcaaaagcgcagatcgatgccgctcgtgccgagcaggcacaggccgctctgacgctaaccagttcggttgcctctgcttattaccagttacaggcgaattacgcgctggaaaatgtgctgcaacaagaggtggataacaatcaacacctggccgacctgcgccaaaagcaatataaagccgggatctacggcgtggaaatcccgcaacagacccaggcacaagccgacagtgccaagcagcagatcatccagctgcagtcacagattgaacaactgaaacaccagttggccgccctggccggtcttggcccgaatgcgatgcagtctctgcatcccgtggccatgccaagcgaagaacagttagcccccaaaggcgaactcaccgcggatttgctgggtaaacgcccggatatcgtggcacagcgccaactggtggagtcctataaccaacgggtcagtgcggcacgcaaagagttctaccctagcctgtcgatctcggcctttgctggcttgaccaccaccaacgtcggcggtaccagcccgaatctgtttgaagccgccagccaggcgtggggcgtggttccagccatttccctgcctatcttccatgccggtgcgctacgcagcaagctgggtgaagagtccgcactctacgatcaggcggtaggttcctataaccaaacgctcgtcaatgcgttacaggaaacggccgacgccatcaccattcaacagagcagtagcaagcagctgctgcaggcaacctctgcctcccaatccatgcaggatgtgtaccgggtcgccaacgccaaataccaggcagggattattgggcgtgatgaactgttgaccagccagacgcagctattacagcagcaacaggcgcaactgaatgccagcagcaacttgatgcaggcgaagatagcattggtacgcgcgttggggggtggctaccaggccccggcggcagcggaacctaaagcataattttagagcgtggagaataccatgagtgcaagcgcggaaactcaaaccccgcagcaaccggctggcaaaaaacggcagcgtaaattctggctgctgctgttgacgtttatttttgtgattattggggtggcctatttagtctattggttcctggtgctgcgtcatcaccaggaaaccgacgatgcctacgtggccggtaatcaggtgcagatcatggcccaggtttccggtagcgtgaacagcgttacctttgataacaccgactttgtccgcaaaggcgatgtgttgttaacactggatcccaccgacgccgaacaggcgtttgagcgggccaaaaccgcgctggccaacagcgtgcgccaaacgcatcagttggtgatcaacggtaagcagtatcaggctaacattgcgctgcgcaaatccgagctgagcaaggtagaaaacgatctcaagcgtcgtatcgtgctgggcaacgccgatgcgattggccgcgaagagctgcaacatgcgcgtgacgcggtagacaatgccaaagcggcactggaagtcgcagtccagcaatacaatgccaatcaggcgatggtgctgaataccccgttggataaacaacctgccgtgctgcaagccgccgcacagatgcgcgacgcctggatggcgctgcagcgtacccgcatcgtcagcccaatcaccggcttcgtttcacgccgtagcgtgcaggtgggggcgcagatctccccagggatgcctctgatggccgtagtagcaccggatcatgtctgggtggatgccaactttaaagaaacgcagatcgccaatatgcgtatcggccaagaggctaccgtagtgagtgacctatacggtagcgacgtggtgttcaaaggcaaggtcgtgggtatcgatatgggcaccggcagcgcgttctcactgctgcctgcacagaacgctaccggcaactggatcaaagtggtgcagcgtttacccgtgcgtatcgaactggacgcacaacaggttgctgagcatcctctgcgtatcggcctttctacgctggtcaaagtcgataccaccaatctggacggcctggtgctctccgatacggtacgtcaaaaaccgctgtttgaaaccagcgcgctgacgctggatctggcgccggtgaatcagatgatcgccgatgtgatccatgcaaacgccggttaagcgagcgggaggctaccttggcacagaaaccgcttgaaggtgcccagctcgcctggatgacggtcgcgctcgccatggcgacctttatgcaggtgctggactccaccattgccaacgtggcgataccgaccatttcgggtaacctcgggtcttccaactctcagggaacctgggtgatcacctcgtttggggtggccaacgccatctccattccgatcaccggctggttggcgaaacgcgtgggtgaagttcgcctgttcctgtggtccacggcgctgttcgccctggcctcctggctgtgcggtatttccaacagtctgggcatgctgatcttcttccgcgtgatccagggcgtggtggcagggccgttgatcccactgtcgcagagtttgttgctgaataactatccccccgccaagcgatcgatggccctggcgctatggtcgatgaccgtgatcgtcgcgccgattttcgggcctatccttggcggctatatcagcgataactatcactggggctggatcttcttcatcaatatcccgattgggctgttcgtgatcctggttgcgatgtcgacgttgaaaggccgggaaaccaaaaccgagatcaaaccgatcgataccgtcgggctggtgctgctggtggtgggtatcggtgcgctacagattatgctcgatcagggcaaggaactggactggttcaactcgaccgaaattattgtcctgaccgtcgtggccgtggtggcgttagtgttcctggtggtgtgggagctgacggacgatcacccggtggtggatctgtcgctgttcaaatcgcgcaactttaccatcggctgtctgtgtatcagcctggcttacatgctgtatttcggggcgatcgtgctgttgccacagttgctacaggaggtatatggctacaccgccacctgggccggcttggcgtctgcgccgatcgggttgctgccggtgatcttgtcaccgattatcggccgcttcggtaaccggctggatatgcgccgtttggtcaccttcagcttcatcatgtatgccgtgtgcttctactggcgcgcctacacgtttgaaccggggatggattttggcgcttccgcctggccgcagttcttccagggttttgccatcgcctgcttctttatgccgctgacgaccattaccctgtccgggttgccgccggagcgcatagcggcagcatcgagcctgtcgaactttactcgtaccttggcgggctctatcggcacctcgatcaccactacgctgtggaccagcagggaggcgatgcaccactcgcacctgagcgagtttgtgaatccgttcaacccgcagtcgcaggagatgtacagcaaactggagcagctaggcatgagtaaacagcaggcttcggcgtatatcgccaacgagatcaccgcgcaggggctgatcatctcggccaacgagatattctggctatcggcaggggtgttcctgatattgctggcgctggtctggttcgccaaaccaccgttcagttccggcgggggtgggggcggagcccactgatcgaatcacgcccataaactccaatggaagtggctaaagatctgctgtgatatggggcggttcaaagatggaccgcctcatagaattgaataatgctttccccatcgacctgattttgtggattttgggtacataaaagacaacaataatgccgcagtgccagaatggatattagttgaatttataaacttttctaacagggaatctctgggctaaaagcatgataaaacaaacactgatcgcagcaatgagccttggtatggttggttgtgctggcatgaaaatacctccctacacagaagtcaaagcaagtccgtattatgatgaatgccgcgagttcgccgccgatgtgtataacaatgatgggtacagcaaactcgtcaatgacacagtactacgcatgaacgagcaaaaagctcaggctatcgtgtctggatgtgtggtctctatgggaaaaaacagtctagaagaagccaaacttgatatgaaacaaaaggccgtcacttacggaatcatcagtgctgcttgcgacaccccttcgtgccaggctgatacggaacaacagctgaaagcttttacccttggcagcttttatgcgacacaaaagaagtttcctgagaaaaagaaagttgagaaagctgatttttaagagtgagccagattatcgatcgtcagtgcgctcatcttagtcttatcccttctcattattattttgcccaatcctccagcatcaggtccgttacccgtccaaacttccgcgtattattggtcaccagaatcacaccggtcgcaatggcatgaccggcgatcgcacttgtccctgtaaaccctatacagagaaaccgctagtacggcaggtttctgtacgtatgttgtagcgaacaaggatatgcctagatgaatacgaataagggggagctttttgagcatagtagtcagccggtttttctactgactctgatagatcaaagccctggctttgcggccagggctttgtcattaatcggattttatatagcctaaagcattacgcctggttctggcgccaccaatcggccaacagaataccggttgctaccgagacgttcaggctttctactttgccagtcccgccgatagacacgctcatatcaccctgttgccaagcgctgtcactcaggccatcacgttcctggcccaataccagcaccatcttggttggcaatttagcctgcgccaacggcgtgcctttatggctggacgtggtgacgatggtataacctgctttgcggaacgtatccagcacggacaggaagtcatcggcattgattgccttgatgtgttccgccccgccctcagccgtacgcactgctgcaccagactccagcaccgctggatcctgaagtaatacgccgttcacgccaaagtgagcacaagaacgaacgatcgcccccaggttgtgagggttgcccacttcttccagcgccagcacgcaatctttggccggtgcgttctgcaggtaagcctgcgcatccagaccttgacgctttttaatcaggaagcacacgccgccgtgatgttcggtaccggacgctttggccagttcctcttcatccaccacatggtaagccttgcggttagccgccatccagcgcagtgcctcacggaaacgtggggttacggattgcacaaaccaggcacggacgatggcatctggacggctggcgaacagagctttacaggcgttctcgccgtaaacacgggtttcttccgcacgttggcggcgcagctgctcagggtcgataaagcttttgccactgatgccaccatgatcgaacgccggttcttcttgcggagcacgggacacggttttccacggtgattcataaccaccgctgtcttcggtacgcgccggacggcgaggacgatcgctttcactgctgctgcgacggggatcggcaccccgacggtcaccaccgcgcgccttatcctgaccggcacggccagagcgtgcattgtcagccgggcggcctttgccgtcaggtcgtttattcttgttacggttgtcgccgctatcgtcgtcactacggacgaacatcactttaactttaccgttcttgccactaaatgaatcgttcattgtcttctccaccaacgcgcagggcgcgaagattacctgatgttggtgcgctaagccaccaacttgcgctaaaagctggcatctatcaaattcatcgaacaaatcacttggtcgaatgccgcgcttttaccgataataagcaacattaaaaatacatattcgcagctcattgtgctgcgtcagccccagaggtaatcatgaatacagtttgtgcagcttgtaatgccaccaaccgcgtgccggaagaacgtctggcggacggcgctaaatgtggccgctgcggccatgaattgttcgacggtgaagtgattaacgccaccgctgccacgttggaccagctcctgcaagacgacttgccgatcgtggtcgatttctgggccccgtggtgtggcccgtgccgcagcttcgcgccgatctttgaagatgtggcacaggagcgcgctggcaaggtgcgtttcgtgaaggtcaacaccgaagccgaacccgagttgagcgcacgcttccgcattcgcagcatccctaccatcatggtgttccgtgaaggcaagatggtcgatatgctcaacggcgcgatgccgaaagcgccgttcgataactggcttaacgagctagtttaacgcaaaagcgcttactatgccgccagttgttgtcggcatctcatcacccagaaagcccgtgcgcctctcccgccgggcttttttctgcgctacaatagcggtttttcaggatagttatgactgacaacgccgtacttcgtctacgccaagaccgtttagaccgcgccacccgaccgtttctggccagaggtagccgcgccgtgcgctgtcagggttgtttgctaccgcagcaaaactgcctgtgtgccaccatcaaaccgcagcaggccaacagccgcttttgcctgatcatgttcggcgcagagccgttaaagcccagcaataccggccgcctgatcgccgatatcctgcctgataccctggcgtttacctggtcacgcaccgaagtcgatccgggcctgctggctgccatcaacgatcccactcgtcagccctacgtggtattcccggcctcttatgctgatgcggatcgcccggtggttagcagcctgcccgcaggtggcaagccgcctttatttatcatgctcgacggtacctggtcggaagcgcgcaaaatgttccgtaaaagtccctatctgaatcagtttccggtcttttcactgaacgtgttggcctcatcagactatttgctacgtattgccagccgccctgaacagcactgtacggcagaagtcgctgccgccctgctgcaacaggcgggggatgaacaggccgcgaccgggctgagccaacatttcaattacttccgtgaacagtatctggccgggaaacctcaccgtccagaggcaccggtcacagcaaatcagccacaaagcgcctagaatcagacgataatttgcctctttcaggcaaaccggtcaggagcaggagccgcatatgagccagagagggttagaagcgctattacgtcccaaatcgattgccgtgctcggcgcttcgcaacagcccggccgggctggctacctgatgatgcgcaatctgctggctggcggttttaccggccctatcctgccagtcacgccacgctacaaggcagtctgcggcgtgatggcctatcccgacgtagccagcctgccgctaacccccgatctggccgtgctgtgtaccaatgcccagcgtaacctggcactgatcgaagccctgggtgagcggggctgcaaaactgccatcgtactttcctccccagtggaacaattcgccgagctgaaggccaccgcacaacgttactctatgcgcctgctggggccaaacagcctgggcttgctggcgccttggcaagggatcaacgccagcttttcgccggtccccattcagaaaggcaagctggcgtttatctcccagtctgccgccgtggcgaataccattctggactgggcgcaacaacgggaggttggcttctcctacttcatcgcgttaggggatagcctggatatcgacgtcgacgatctgctcgacttcctggcccgcgacagcaaaaccagcgccattctgctgtatctggaaaacatcaacgacgcgcggcgtttcctttccgcctcccgcagtgcctcgcgcaataagccgatcctggtgatcaaaagtggccgtagccaacaggcacagctactgctcaacagccagcagggattggacgccgcttacgatgctgccatccaacgcgccggtttgctgcgtgtacaggatactcacgagctgttttccgccgtggaaaccttaagccatatgcacccgctgcgcggtgagcggctaatgattatcagcaacggtgcagcccccgcagccatggcgctggacgaattactctcccgcaacggtaagctggcaacgttgacggatgagactcaggagaagctgagcgcagcgctgccggagtttatccggccaggaaatcctatcgatctgcgtgatgatgcaacccccaagcgctatctggcagctctgcaaccgctgctcgacagccacgactatgacgccctgctgctgatccatgcccctagcgcagcctctccgggcactgagaccgccgaacggttgatcgaggccatccgccagcacccacgtgggaaacgcattacgctgttaaccaactggtgtggcgaatactcctctcaggaggcccgccgccaatttaccgaggcagggatcccaacctatcgcacgccagaaggcgcggtcaccgcgtttatgcatatggtggaataccgccgtaaccagaagcagctcaaggaaactccggcgctaccgattgggcttacggccaataccgctgccgcgcaccagttaatccatcaggcgttggccgaaggggctagccagttggatacccatgaagtccaaccaattttgcaggcttacggcctcagcaccctgccaacctggattgccagtgacagcgcagaagcggtgcacattgccgaacagattggctacccggtagcactgaagctgcgttctccggatatctcacataaatccgaagttcagggggtcatgctttatttacgtaccgccaccgaggtgcagcgggcggcggaagcgatcctcgaccgggtgaagcgtacttatccgcaggcgcgcatccacggtctgttagtgcaaagcatggccaaccgtgccggagcacaggaattgcgtattgccgttgaacaggacgcgaccttcggcccgttgataatgctgggcgaaggtggcatcgaatggcgcaaggaaaaccaggtcgccgttgccctgccgccgctgaatatggcgctggcgcgttatctggtgttgcaggcggtgaaaggaggcaaaatccgtgggcgcagtgcgctgcggccgcttgatatccccggcttaagccgcctgttggtgcaggtttccaacctgatcctcgactgcccggagatctcacgcctcgatattcatccggtattagcctccggcagcgagtttaccctgctggacgtttccatgcagttaacgcctttcagtggcgatccacaggcgcgcctggcgatccgcccttatccccatgagctggaagaaaccattgaattaaaagacggttctcaatgcctgttccgcccgatcctgccggaggatgaaccggcgctgaagcactttatcgaccgtgtcaccaaggaagatctctattaccgctactttagtgagatcaacgagtttagccacgacgatttggctaacatgacccaaatcgactacgatcgagaaatggctttcgtagcagtacgcgatggcgaagagatcatcggcgtcacgcgcgccctgtcagatcccgacaacaccgacgccgaattcgccgtgctggtgcgttccgatctgaaaggtctgggtctgggccggcagctcttgatgaaaatgattagctatgcgcgagcgcaaggcctggcccgcctgacaggcattaccatgccgaataaccgcggaatggtcacgctggcacaaaagctggggttcaaggtcgatgtgcaaattgacgaagggattgtcaatttaaccctgccgctacaggatggggcgacgccgtgaccgctgtcgcaatgtaatacgaatccactacttaacgccaaaacatacgcacaatcggggcaactagtggtattatcgcccgattgttcgaagcattttattcatggaagtggcgttccggccatccaaatatgagagaagaagcgcactgtgatgttgtcaaaatttaaacgtagcaaacatcaacaacaccttgcacaactgcccaaactcccccagacggttgctgatgtccgtaccctttttacgccggctgatttccgtgcaacgctgctggaatcgatcgctaacgcaacaacccgtatttatctggtagcgctctatctggagcatgacgatgcgggccgcgacatcctcaatgcgctctatcaagccaagcagcagcgccctgagctggagatctgcgtgttggtagactggcatcgtgctcaacgtgggcgtatcggtgcggcagcggccaataccaatgccgactggtactgcgccatggctgcacagcacccgcaggtttcggtgccgatttacggcgttccggtcaatactcgcgaagcgctgggcgtactgcatttgaagggctttgtcgttgacgatacggtgttctacagcggtgccagcattaatgatgtctatctgcaccagcatgataagtatcgttacgatcgctatcagctgatcaccaataatctgttggcggtgaccctgtgcgattacatcaaacagcatctgttaaccgccggtgccgtgcagcgtcttgatcgtgctgacaggcccaaaagcctcgagatcaaaaacgaaatccgcctgttccgctttgcccttcgccgtgccgcctatcaatttcaggggaacgccagtaatgatgagctggccgtcaccccgttagtcggcctgggcaaacagagcattctgaacaaaacgatccaccacctgatgtccagcaccgatcagaaactgacgctgtgcacgccttacttcaacctgccagccttgctggtgcgcaatatcatttatctgctgcgccaagggaaacaggtggagatcatcgtgggtgacaagacggccaatgacttctacattcctgaagatcagccgttcaagattatcggcgcgctaccttatctctatgaaatcaacctgcgccgcttcctgagccgcctgcaacgctatgttgataccggccagctgattgtgcgcctgtggaaagacggcgataacagctatcacctcaaagggatgtgggtcgatgacgagtggcagttgatcaccggtaacaacctcaacccgcgcgcctggcggctggatcttgaaaacgccattctgttccacgatcccaagcacgaaatgcaggaacagcggcataaagagttggaaacgatccgtacccataccacggtggtgggccactatctcgaattgcaaagcattcaggaatatccggtcaaggtgcgcaaactgatccgtcgtctgcgtcggatccgtatcgatcgcttgattagccgtatactgtaaactcgctataattaactgcaccacagcccggcaatgccgggcttttttgtccatattgagacaggatgttttcactatgcgcccactccgtctgctcatcctccttccggtattgttgttctccagtggctgtacccatatggccaatgatagttggaccggcaaagacaaggctcaacactttgtcgcttccgctgcatttgcggccgctggcgcggcttatggcgaccaccagaactggaatgaggcacgtagccgcagttttggcctgctattttcgattggcttgggcgcagcgaaagaactgtatgacagtagagaaggcggtacgggctggagctggaaggattttgcctgggatgtggcaggggctgcgacagggtacagtatttatcatctggcgcgttgagggtcagtcaatttgtcagatcgagtaatacccttcccctcaccctctcccccaggagagggaaccgatcgagcccgctgttttctctgcgtcataccccatccttaggctgactcatcactaacgaagtggtatggctaatcaaaggttccctctttccgaagccgcacgggctcatccacgatgccggtcggctccctttcccctacacaagtattcaggatgttctcggttggtactctgggagagggcgggggtgaggggctttcactgatattttctgtttttgacccatagc

SEQ ID NO: 358 - DNA, 275 bp, unknown
  Altogen  635822 strain
aacaacacatcgatcgccgtctataactcatttagcccggcgaccgcgcaacacggcgcgctggcgtcgaacgtcaaaattaatgggatatcggttaaccctgccagtcggtcaacagccgacgtgttgattgttggtcaagtcggcaggcaaatcaccaatggcgttgtgcgggatgggaacgggatatcgtggtcactgcctgcggtggtggtgattggcaccagtggcgatgtgaccgtgacggcaacatgccaggttgatggcgctatcgt

SEQ ID NO: 359 - DNA, 897 bp, unknown
  Altogen  635822 strain
  misc_feature (756)..(846): n is a, c, g, or t
gcatcaagcgccagcaggcacccaatggcaccccgtatgcccgtcgccgccagccggtgcggggtaaaaaaggccgagtgaagcgggccatgtttgccaagttgcgcaccaatcgttacatgcaagccaagggcagtaatgatgacgcggtggttgagtttgttgggcgcgtgcagcgtatcgcgcgcgtgcatcaggacggcttgaaagaccgaccaacgcgctatagcaaggatgtaaggtatgacattcgccagttgctgggctttagcgaggctgaccggcaaattgttgaagatgtagtgatttctcactttgcagatagctgatagacgttaaccgttgtttggtgggccatcctacgcccgcagattgccgctggatctctctggcggcatcctttccccatgaaaacactcgaatccctctcagagctggcgcgcgcagtgcgcaaccttatccgcattggcgtcgttgctgacgtcaatatcgatgagggatgctgccgcgtccaaaccggtggcaataccaccgcctggttgaactggctttcctgccgcgccgggcgctcgcgtacctggtgggcaccgtccattggcgagcaggtgcttgtgttatccctgggtggtgagctggataccgcctttgtgctgccgggtatttattccgatgacttcccgccgccatcaacctctgccgatgcattccatatcagctttcccgatggtgcggtcattgagtacgagccggaaaccnnnnnnnnnnnnnnnnnnnnnnnnnnnnnnnnnnnnnnnnnnnnnnnnnnnnnnnnnnnnnnnnnnnnnnnnnnnnnnnnnnnnnnnnnnnggccacgccggaggtggtctgcacccacaagctgaccaccggcacgctgga

SEQ ID NO: 360 - DNA, 17388 bp, unknown
  Altogen  635822 strain
  misc_feature (17359)..(17359): n is a, c, g, or t
gtctttaaacatacaaggggacctaccgtgccacagattggactttgtgcccgacgatagcgacagctctcaacgagccacaatttgactcccgcactcgactacaacaccgatctggctccctcaccttgggaagaggacggaacatgtcacagattgactcctacacctgacaacagcactgaactggctccctctccttggggagagggttggggtgagggcgaatgcaccttggtcaagctagaacatttggcgagttggtagaacccatctaacccgtggctttgaacgagagtgattttgcggatgaatgtttcagattgatgatgacgaaaaaacaaacggccagcaaaggctggccgcattcgatcgcaccgggttgccgattaacggcgaacggcgatggcttcgatctcgattttcacgtcttttggcaaacgtgccacttcaacgcaagaacgcgctgggaatgaggcgttgtgctcggtgaagaacgcttcgtaggccgcgttaacggtagcgaaatcgttgagatctttgacgaaaacggtggttttaacgatgtcgcccactttcaggcctgcggcttccacgatcgccttcacgtttgccaatgactggcgagcctgagccgcaacgtcatcgggtacggcaccggtttttggatcgaccgggatctggccggaggtgatgatcatgctgcccaggtcaacgccctgcacgtaaggaccaatggcggctggcgcgagttcagtgctgatattacgtgacattttttctcctgatatcctgttgttgttcaaacggcgagtcggcccgccgtaaactcacatggacgcagcatgcagcgcccctacgacgcaccattataaagggtacccgccagattaacagcggcataccctggtaaaacggaggattttagtcggtctgtagaaccacctgatgatcgaactctttctcgcagtaacggcacttcaggtgcacttcccctgcatgggatttgacgctgaaactggaggccaccggctcgctgcggctgatgcagttgctgttcgggcaggtcagcacgccgtcgatatgatccggcaggctgagcgtcagcttgcgcactacttcatagttatcgatacggttgaccgtagccttgggcgcgtacatcgccagctggttggcctgctgctcggtcaggaaggtgttctcgatcttgatcaaatccttgcggcccagctctttggagggcaggttcaggccgatggtgatgcgctgatcggtggcggtcagtttgaacagtgagagcagcttaaagccgatttgcgccggaatatggtcgatcaccgtgccgcacttgatcgcttcaacctggagtttgttatcgtgagtcatgacggttcccccttaaagagccaaatctgcgtttaaaaccagtgccaacagcgcctgacgggcgtaaataccgttgcctgcctgttggaaatagtgggcatacggtgtcttgtccacctcaatggcaatctcatcaatgcgcggcagcggatgcagcaccttcatgttgtcccgagcaccggccaagtcagaagctcgcaggatgaactgcgccttcacgttggcgtattcggatgggtccaggcgctctttctgtacgcgggtcatatacagaatatccagttcaggcaccacttcttcaatgctgttgtggcggctgtaggagatgcctttttcgtccagcatcttcaggatatagctcggcatcgccaaagcgtctggcgcgatgaagaagaagtggtttccttcatattttgccagcgcctgggtgagtgaatgcacggtgcggccatatttcaggtcgccgaccatggcgatattgatattgctcaggcggccctgggtttcctggatggtgaacagatccagcagcgtttgggtcgggtgctggttcgagccgtcaccggcgttcaacactgggataccgccagagaattcagcggccaggcgtgatgcgccttcctgcggatggcgcatcacgatggcatcaacgtaggtgctgatcaccgagatggtatcggccagcgtttcgccctttttgccgagggaggtgttgctgctgtcggagaagccgaccaccgaagcccccaggcgctggatcgcggtctcaaacgacaggcgggtacgcgtagacgcttcaaagaagcagctggcgatcaccaggtgtttgagcagctccggctgcgggttagctttcaggctggcggcggtgctgagcaccagctccagatcttcacggctgagatcgttaatagagatgatgttcttgcgatacagcggattggccatgttcactctcctcgactcgggcccttggcgcggggcttttcaatgtaatagcaatgctttggacaaaaaaaagcccctcaacgaggggctttaaatgatggttcatgcaacaggggaaataacggcagttgcccgccgattggctggcggttttgtcgagtgtggcgaacaaaacaaaggtcgtttttcatgctttctcctggcaaattgtcgcgcattatactcgcgctttttttctctgcaagggtaaaaacaccactttttgcgatttcgcaatcgattggcttggtgattaccgccgcgatcagaacgcggtgtccaactgttcgatcacgttgtactggtcgtcgatcaaaaacagcgttttccatttatcaaacgtcaggcacggatgcgaggtggcaaataccagaatatcccccacctgaacgttgctatctgctgggcaggtcagcatggcgtgttggtccatgatgccgatagttgttaagcccgtggtgccgccttcctgcggccgaccattgcgataatgggcgatcggctgtggcagaccggcatcgaaggccgcatcacgcttgccaaagtttacgatgagacggcccggctccggcacggactgcaccagcgccaccagctccaaggcagaggttaactcaccggccaaatcgcaggcatagctatcgcgcgccagcacggcgttttgcgcttcctgatagataccttggtcgtgggtgatgtagcagccaggcctgatcaccacccggcagttgtccggcaggctttcgctgccccagacgttgcacactacgtcgtaccaggaggagccagctccggtcaggatcatctcttcctcgccaaaacgttgctgcaggtgtaattcacgcaacaaaccggcggcttcacgcaggaacagttcgatcttctgttgggcatcagcaccgtgcatcactccctcatacaactcgatgcctctcaggcataagcccggcagcgtagagatctcctgcgccaactgttgcgcctgtgccacgctgcggcaaccgcaacgcccgccgggtacgcccagctccagcagaatatccagcgtttgcccacgaccacggaaaaactcgtccagagccagggcgttgctgaggctgtccacgcagcaataaaacgtggtggccgaatgctgttccttgagttcgctgattaactgcatgttggctttgcccaccaactgattggccatcagcacccgtggcaaaccggcttccattgccactttggcctgccaggccgatccgacgccaatcgcccaggcaccgtgcgccagctggcgttggaaaatccagggtgtcatggtggttttaccgtgaggggccagggaaacgccgcgcgcatcggcatagctttgcatccaggccatgttgttttccaggctagaacgtttgatggcgcaggccggtaggcagacgtcttcatgcagcaggttggcggtaccgtccgcagcctggaacatcatggccgctttgtggctgattgcagcgttattttggtatttcataacattatccttggctgttctatcttgttttagatgttggtatctatatttaaccgtatgatttaaatgtagtataaaaatttatttagctattttgggtacaaagtatcagtttttgatcttatttttgtgtagtcttccactgttttagcagcttgtaaatggcagaatttaaccactatgaggttgggtcatgagtattgagatcgacatcatctcgcgcattaccgaacgatttatcgaattgagcggcacggaaaagcgcattgcccagttcattttggacgacgtcgcggcggtaacggctctgccgattgccgagttcgcccggcaggcagaggtcagccaggcttcgatcacccgctttgccaaggccgtaggctgcaaagacgtgcgtgacctgaaggtgaagctggcccagtcactggcggtggggcagcgctttattcacgaagaaccggatctggaaggtatccagggcatttatgaaaccatcatcaatgtgctgaacatcaaccgccgggccattgatgaatcggcgttggccaaagctgtcgactggttaagcggcgcacgccaaatcctggcgattggcatgggcggtggctccaccatctgcgcggctgaagtgcaacaccgtctgttccgcctggggctgccggtgattgcccagagcgatgggttgttggtgcgcatgatggccgctgcggtcagcaagaacgacgtggtgatcgcgttgtcgctggggggttatacccaggaagtggtggagagtgcggagatcgcccggcaatacggtgccaaagtggtcgcgattgccccgccggacacaccgctggccatgcaggccgatgtgctgctcggcctggtggtgcgtgagaatgattacatttataaacccagcacctcgcgctatgccatgttggcaatggtggacgtgctggccaccgagttggcaatggcgaataaacgccaatccagggatcggctgcggcgcatcaaactggcgctagacagccatcgcgggggggctaatcggcaaccgttaggtgactagatgatgtcacccctgcgacaaccagaagggctaagacgcatgcagtatcagtatttgttcaagaatgtcaccgtggtagacggcagtggcggcccgcaatatcgggccgacgtggcggtgcaaggcgatcgcatcgcagccattgcacccgcgattaacgccgaggcccaggtcgtgatcgacggcactggccgcgtattgtcgccggggtttatcgatgtccacacccacgatgataccaacgtgatccgcatgccggagatgttgcccaaaatctcgcagggggtcaccacggtgattgtcggtaactgcggcatcagtgcggcgggggcgatgattaacgatcgggtgccagacccgatgaacctgctgggtgaaaaggcccactttgtctacccgaccgtagcagcctatcggcagaaagtgaccgaggtttgcccggcggtaaacgtggcgacactggtgggtcacaccatgttgcgtaataaccagatgagcgatttgtatcaagctgccagcccgcaggagattgacggcatgcgtgcacagctgcgcgtagcgttgcagcagggggcgttgggtttaagcaccggtttggcctatgccacggcctttgccgcccctaccgaagaggtgatggcgctggcggaagaactggcggcagagcaggggatctataccacccacctgcgttccgagtttgaacccattttagaagcgatggatgaagccttccgcatcggccgccacggtaaagtaccggtggtgatttcccaccacaaatgcgccggtgccagcaattggggccgcaccaaggaaacgctgaagctgtttgacaaggtgcgccagagccaggatgtttcctgcgactgttacccctattcggccagctcatcgacgctggatatgaaacagatcaccgatgagtttgcgatcaatatcacctggtcagagccgcatccggaaatggcgggcaagtcgctacaggagattgcccaactttggcagacggatatccacagtgcaggtaaacgtctgatgccagccggggcgatctactacaacatggacgagcaggatgtgcggcgggtgctaagctacccggtcaccatggtcggttcggatggtttgcccaacgatccgatgccgcatccccgcctgtggggggcctttccgcgagtgttgggatattactgccgtgagcaagggctgtttccgctgacgatggcggtgcacaagatgagcggcatgtcggcggcccgttaccaattgccgttgcgcggcttggttaaagccggttattacgccgatctggtcttgtttgatgcggataaagtgaaagacagcgcgacgttcagccagccgcagcagcccgccgaggggattgaggcggtgtgggtgaacggcgtgaaaagttatgagcagcaggccgtaacgggccagcgtgccgggcggtttatctgccgccaaggtaaatagattgctattgataaggagaacacatgacgattaaacgctacggcgcagcaggcgctaccggcaccggtggacaacacttgcccttttcccgtgcggtagaagccggtggctggttgtatatttccggccagacgccgatgaaaaacggtgaagtggttgaaggcggcattgtcgatcaatcgcggttagcgatccaaaactgcctggatatcatggttgaggccggttatgagctgaaagacgtggttcacgtaaaggtgatcctgaccgacgcgcgttatttccagtcgttcaataaagtgttcagcgaattctttgctgagcatccaccagcacgtatttgtgccgtggccgatctggtggtggattgtaaagttgaagtggatattacctgttataacgctgcacgcatcaacaaataatagtccttctaaaaaataaatatatagggtggtttagccaccctaataaaaaatgcctgatatatgtcaggtgacggaacgctatttctctaattttattttaccagtaccctacactgacaggacgtgagcgatgaataatttatctttccttatatggtttgccgtctatgccctggccatgattattcttggctggtatgtttcacgccaccaaaaaaacggtgatgatttcctgctgggcggccgctctttgccgatgtttctgacactgggttcaacggtggggaccatggttggtacgggctccagcgtaggtgcagtgggcttcggctatctcaacggttgggccgggatgctctacggtattggcggggcgattggcatcttattggttgcctggctgtttgcaccggtcagaaaaatgcgctttatgaccatgagtgaagagatctcttattataccggcggcagtaaaatagttaaaaatgtggtggctttgctgatatttgttgcctccattggttggttgggtgcccatattttagggggtggattgtatttggcttgggccagcgggattgatattaacgttgctaaagtgattattgccttggccttcgtggtttatgtggggattggcggctattctgccgtggtatggatcgatacggtgcagtcgattgtattattcctcggttttattttaatggccgtgctggcggtgcaacacgttggcggttgggaaaatattaaacaggcggttgaccctgcggcacaaagcctgtttgccatcgataagctgggtattttgcctgcgttctccctggcattggtgatcggcgtgggcgtgctggccacgccttcctatcgtcagcgcatctactcggccaagaccgtttcttctgtgcgtcagtcatttaccattaccggcatcctgtatctgttcttctccttcttgcctgccatcatcggcatggcggtctggacgatgaacccgaatctggaaaacagcggttttgctttcctgtttggcacccaggtgctgcctcacgttatcgctatggcgatcctggtggcagggatgtcggcgaatatgtcgtctggcagctcagatgccatcgcaggggtctctattatcctgcgcgatctctataccttgtttaccgggcgtatgccgcaagagcagcacgcgatccgtctttctcgcatcttcctggtgctggtgatcgctttggcgttggtgtttgccctgacttctaacgacatcattggctatatcaccaagatgatctcaatgatcatgtctggcctgtttatctgctcgatcctcgggcgtttctggcaccgctttaactggcaaggcgcgattgccgcactgatcggcggagcggccacctcgatgacggtgttgatgaacagcagttggctggccttctggggcaacccttgcttcccatccgtgatgttcagcctgctcgccgccgtggtggtcacgctgctgaccccagccaatcaaatgagccgcgaggaagcgctggacatgatcacccgtgagcgggaaaaccgcccagccatcaagattccattaggcaaaaaaccggtggtcgcccgcgactgatgacttgctacgtaggggcgccgcatgctgcgcccgttaagataacccgtaattcgtggaccagaggtacagcatgaaggccgattatatcgccgttgattggggctccagccagctacgcgcctggcggatagaaaacggagagtgcacggcacggcagagcaccccgcaagggatcaagtttgtggggaacgggcagcacgaggcggtgttgcgaacgctgctggcaccctggtgggagtggattgtggcgcagcaggcgccggtattgatggcgggcatgattggcagcgacagcggttggctggacagcggctatcaggccttgccattggagataaatgcaattgctgagggatgcatcccggtgcccacatcgttgcccattaagctgtggctaagacccggcctggcgttgcgccacaaagagcgggccaacgtgatgcgcggtgaagaggtgcaactgttaggcgctatggcctgcttacaggtggatatctatctgttccccggcacccacagcaaatgggtgaaaccactgcgtagggaagcggcaatcaccatcgaaagctttagcacggcgatgactggcgagctctaccaactgttgttacagcacagccttttaggtaaagggctgccaagtgaaggggcgtttgattcatcggcatttagccagggtgtggaagagacgctgcaaagcgacgaagggctgattaatcgcctgttctatgcccgttcgcgccgtctcctgggctatatggcgccggaagcggtggcctcgtggctttcgggggcgctgattggcgaagaactggcgcaactggcccgccactggccaaccagcagcaccttggcgctggtgggggatgccccgctggccggccattatcttaccgcctgccaattagcagggcgtcaggccacggtaatcgatgcgcaaaccgcaatgttgaacggattcaggaggatttatgcagccttataaattgccactggtggcgatattacgtgggatcaccccagaagaggtgctggaacatgccagcggcctgctcgccgccgggtttgagatgattgaagtgccgaccaactcgccgcgctggcaggaaagcgtggagttattacagcggcattatggcagcaaggcgcatatcggggctggaacggtgattgatgacgctaagctggatgcgttaattgccagcggcgcgccgctgatggtaacgccgaacaccaatccggtgctgatcagccgtgctaaagcggctggattgactacctgcataggtgctatgacgcccagcgaagtatttgccgccttggaggctggagcggatatcgtgaaggtgttccctgcggcaattatgggtgtggactatgtacgcgcattggtgagcgtgctgcctaaaacgacccagctgtatgcggtaggtggcatcaccccggataacctggctgagtatttggcggcagggtatcgcggggcgggattgggatcggatttgtatcgggcgggccaaacggcggaggaaactctgcaaaaggctcagcgttttgccgccgcctggcgtgctgctagcgcttaatcccgcatatgctcgccggcctgtaaggcagcccggtcgtaatgctgcacgatgtggccgttctccatcagggcggcgcgttcggacatatgggcaatcacgtcaccgtcatggctgaccagcaagtaggtcatgccatgctcgcgtttgaggtggttgagcaggttgaggatctccgcctgcaccgacatatccagcgccgaggtgggttcatccaagagcagcagcttaggccgcaacagcagggcacgggcgatagcgacgcgttggcgttggccgcctgaaagctggtggggatagcgctgtgccgtggccgcgctcagccctacctgccgcaaggcttcgtcgatccgcgccgtaatgtgtttctcaccgtggatcttcaacggttcacccagcgtacgggcaatctgatgctgcggatgtaacgaagcatagggatcttgaaacaccatctgcacctcgcggcgtaattggccggtgaagcgttgctgtggttgcagaggctggccgagcaagcgtatttctccatgccattcacgttgcaaaccggccagcacgcgcagcacggtggacttgccacagccggaagcgccaatcaggctgaaggtttcccccgcctcaacgccaaagctcactgactccacggcgatcttatggccgttgccctgcgggaagctgacctgcaaattttcaatgtcaatcagcgccatgttcgctccgggtaaaatcgatgctgcgatccagcaccggcagatcctggccgtaggtgctggcattggggcggcaggcccacagcgtgcgggtgtaaggatgggtggctagcggcaggttggccgcgatcccctgatccaccagcctgccctgatacatcaccaatacccggtcgcaacgttcagccaccagcggcagatcatggctgatcagcaacagccccatgttacgccgcgtggtttgttcgacgatcagatcgaggatctgattacgtaatctggcatccagcgccgaggttggctcatcggcgatcagcagttgcggatcgttaaccagcgcaatcgccaacatcgcgcgttgccccataccgccggaaagctggccggggtagctgtgatagaggctttccggcaagccgacggcggccagtgagttcagcactcgctcatggcgatcggcccgagtcagtgcgttatgcagcaccagggattcttcgatctgcttaccgatgctgcgtaccggattcaatgcgtagcgcggatcttgcagcaccatagcgattttggcgccgcgtacctcgttccattggcgtggctgaagcttcagtaaatctgtctcacgatagtgcagcttatcggcggtgacgatgcccggcttacgtaccagccccatcagggcgcgggcggtcatggatttgccggaacctgattcccccaccagcgccactttctcccggccaatgctgaaagaaaggctatccaccaccttgtggccgttaaattcgatattcaggttctgtgctgtcagcagtggttcagtcatgatgcggatccaataagtcgcgcaggccgtcgcccagcaggttaaacgccaggctgctgatcaggatcgcacagccagggatcgctgcgatccaccactgatcgaagatcacctgcatcccgtcggctaccattgatccccattccgccattggcggtcgggcacccagccccaggaatcccagaccggcggcggccagaataatccccgccagatccaatgctagccggacgacggcagagggcaggcacatgggcagaatatggccccacagcagacgcggcccctgaatgcccatcatctcggcggcggccaggtagtcgcttttacgcagtagttggatctcggctctggcctggcgggcataggcgggccaggtggtgagcgccaatgccagcgcgccattaaccagcccagggccgagcatcgccacaaaggcgaaggccaggatcagccgtggcatcgacatgaccacgtcggtaaagcgcatcaccacgcgctccagccagccgccgtaatagccggatagcacgccaatcagcaggccgagcggcagggtgattgcggtgaccagcagcaccagcccaagggttggccgggtgccgtaaatcaggcgggaaaggacgtcgcggccatagctgtcggtgccaagccaatggcccgctcccggcggcaataggcggttggcggcgttctgccagttgggatcgaccggtgccaaccaaggcgcaaacagcgctatcagcaccagtaacagcaggatggtggctccgcaggtggcggaaggtgagcgtttaagcagcgtcatggtcattggcgcgccctcggatcgagcatacgcaccagcaggtcggtgagattgttgataatcacaaagcacaggccgatcagcagcgtgccgcccatgatggcggtggtgtccccggcaaacagcgcggtggtcagatagcggccaatgcccggccaggagaacacggtttcggtcagaaccgctccttccagcatgctggtataggcaagcgcgatcaccgtcagcagggtgccgctgatattgggcagcacgtggcggaacatgatgcgcatttcgctggcccctttggcacgcgccagggtgatgtactctttattcaattcgctcaggcaggcggagcgggtcaggcgggtaatgctggccaacgaataataggccagcaggcaaaccggcagcaccaggtgtgccaacgcattgcgcacggcccccgcatcgccggaaagccaggtgtcgatcagcgcgaagccggttttggcctccacggtgtattggtagacatcgtccaaccgccccggcccggcgctccactgtagcttggcgtagaacagcaatagcatcagcagccccagccagaagatgggcaccgagttgccgagcagggtaataaagcgcacgccgatgtccagcttgctgccggcaaaacgcgcgcacaatacgccagccagcacgccgagcggggctccaatcaccaacgacagcgtggccaattccaacgtggccgggaaggcatgcagcagatcctgcaataccggttggccggtggcgctggcggtgccgagatcgccatgggccagccgctccagatagtgccagaactgcaccggcaacgagcgatccaggccaagctgctgttttacctgctcataggtggcggcgctggcgtgatcgccgacgatctgcaacacgcgatccaccggcgacaaggcagacagcaggaaggtgatcaacaataggccgaacagggtcagcgccagcgtgagcagcccctgcgccaatccccaaagacgacgccgggaacggcttcccggcgtagattttattgctaccgacatggcaatcctgattatttgctaacgcgatcgtaatagaccatatctgcattcaggccctgttgatagcctttgacgttatcgcgcagcaccacctgcgttttggcctgatcgataaacacatacggtgaactgcgctgcaattcctgttgtatagcggtatagagcgcagtacgtttggccggatcggcctctgcgaccgctgccagcgtttgtttgcttagctcagggatctgccaactgttcagcccggctaccgtgctgcttttgccgtcgttataggcgaaagcgctggcattggagtgcgcatcgaagtaatccgggatccacaggcggatcgccgcctgatgctgcttggcgcgtacgcgggcatagacctggctaccggcggcaggcaacagatcgagcttcacgccaccttgggcaaagctggcctgtaacgactgggcgatggtgataaacggcggtttgttttccacgtccagcgtcaggctggcgttggtgatcccggctttttccaggatcgccttggccttggccggatcgaagctgaacgggttatcctccagcgcccccggcaggccgacgggcaggaaactctgatggacgaagtattgtcctttcagcagatctttggtgatgccctgataatccaccagatagcgagccgcttcccagaaggccgggttcttcagcagtgggttggcggtattaccggtgttgaacaccagatagttttgctcggcggaagggatttccagcaccttcacacccgcctggcttttcagcgcggcggtttgatccgggccgagttcacgcgccacgtcggcatccccttgctggatcagcaggcggcgcgcgcttgggtctggcacgttcttgataatgatattgctcagcagtggcttatcgcctggtgaagttgggttggcgtccagcacgatcgcctgatgtggctggtaaacccgcatcttgaacgggccgctgcccgcagagtgcatcttcaaccaggcgttgccgaagtcatcacccttcacgttaggctgcacggctttgctgtcgacgattgaggcgatcggcgtcgagaggatattcagggcaaccgccgggctgacgtctgccgtccagctcagttgcacggtatgctcgtcgatctttttcagctgttgttcgatattgtccggctgccagccgagcacgttgaggataaacgccggtgacttgttcatcttcactgcgcgggtataagagaaaatcacgtcgtctgcagtcaacgggttaccggaggaaaacgctgcctgtgggcgcagcttgaccgtcagggtcttggcggcggcatcatcctgccaactttccgccagcaccgggatcaccttggccggattgtcacgatcggcctgcaccagacgctgatagaggctggggacggtctggatgctggaaagctcattggcctccgccggatccaggctgacgatatcgtccagtgactgcaccactaccagcgtatttggcggcgtggcagccagtgcggtcgtggagagggcggcaagaataaacagcggcaagactttggctttcatagacgttttcccttaaatgtgccggtaaaccagaacggagaagaggttgttctcattagttttttacggcatttctgccgccagaatgccacggtagaacgttggtaaaaaacaggcaaaggccaagaagttatttgatatgacgaaaaagactatagaaccagaaggggggattaaccagaagaaacccttctgtgagaagggttttttgagagggtgatttacaaggttttgcttaacgtggcgaccatcaccgccttgatggtgtgcaggcggttctctgcctgatcgaacacgatgctgtgctctgactcgaacacctcgttggtcacttccataccgccgtgcatgccgtactgttcggccatctgtttacccagcgtggtttgatcgtcgtggaatgctggcaggcagtgcaggaatttcacctgtgggttgccggtcagtttcaccattgccatattcacctgatacggcctgagcagcgcaatccgctcctgccagacttctttggcttcccccatggaaacccaaacgtcggtatacaggaaatcggcaccctgtacgccttcggcaatatcttccgtcagggtaattttgccgccggtctgctgtgcgagcgcctggcattctgcaaccagctcggcctgcggccaacaggccttcggcgcgaccaaccgcagatccatgcctaccaacgcggcggcttccagcagggtattgcccatattgttacgtgcatcgccaatgtaggcgaatttcacctcgctcaacgctttccctggcaggtgttcacgcacggtgagcagatctgccagcagctgggtggggtggaactcgttggtcaagccattccacactggcacaccagcgtgttctgccaaggtttccaccaggcactggccaaaaccacgatattgaataccgtcgtacatccggcccagcacgcgggcggtgtctttcatcgactctttatggccgatctggctgccgcttgggccaaggtaggtcacctgagcgccctgatcgaatgcggcaacttcgaaagagcatcgggtacgagtagagtctttttcgaagatgagcgcaatgttcttgccttgtagatggcgggtttcctggccttgcttcttggccagcttcaaatcggcggccaactgcaacaaggactggatctcactgggggtaaaatccattaatctcaaaaagtgacgactgtagaacgggttcatctggctcatctccgtaaatccctatcgtttgattgaatttaaattcactttatatgtatgaatattcaatttcaaccccgaagcagaaatctttcacgtttatcgtggcagcggtgccagcggtgtgtgaaaatagaagtaacgaagcccattttattgaggatagaggcatggcaaaccgcgaattgctggaagaacaacgtgaagaaacccgcctgatcatcgaagaactgctggaagacggcagcgatccggatgcgctctacactatcgagcaccatttctctgccgaaaagtttgaagttctggagcaggccgccgtggaagccttcaagttgggctacgaagtgaccgatgccgaagagctggaagtggaagatggctccatggtgatgtgctgtgacgtgatcagcgaagttgcgctgaatgccgagctgatcgacagccaggtagaacaactggtggcactggcagaaaaatgcggtgtcaattacgacggttggggcacctactatgaagatccgaacggtgaagaaggcgacgacgatgaagaagacggcgactttatcgatgaagacgacgacggtaaacgtcattaattaaatcctgcgggctggcgcaagctggcccctgatagaacccgatgaaataccaatctctgttatccccgattttaaacttcctgcactgtgaaaccccggatggctggatcgaagcggcccgccgcccggaaaacctgcccctgttgctgaccgaccacctggtatgcgagctgaaagcggcgcagaccggcatgtggctgatccgccgctacgtggccgataaagagagtggtgatgccctgctggcactgctcaggccctatgaggcgtttgtgcacgaggcgcaggaagtgccggaagagctgttccgccagagcgcgtttaccaggaagatcctgccgaagaatggctcggcctatggccaggatttggtcgacaagatggtgttgctgatcaaagaggagttgcatcacttctcgcaggtgctggagatcatgcaggcccggcagatcccttatagaaagatcaccgccagccgctatgccaaaagcatgnccccccccagccgctatgccaaaagcatg

SEQ ID NO: 361 - DNA, 272 bp, unknown
  Altogen  635822 strain
ttggttgtttgagcagagatccacgagcacccctccctatcttgttaagccatcccacacaaaaaagcccgcagccgccatagcatatgtaagaaaaataggtgtaaaaaactaatgagttatatagaaattcgtcaccgcaagaaacggccaataaataacaaagatgagcactgagccggttcagcttacttgttctatgtaacaaagcgctgatttattagcaggcaggattaggggtaaaattcacgtgggtgctctggatctttttg

SEQ ID NO: 362 - DNA, 287 bp, unknown
  Altogen  635822 strain
aatagcgcttatcaggcattgcctgctcgactcgccggattttcatcgggcgtggctaaatcggaagaactgaacagcgcctggcgacaatcgtcggtaattgcttgcgcgttggcacaattcatcgccgataaaaccggtaaggacgtactggatgacggggatctggtaacccttcaggcgaatctaaatagcgcgatgctgattgctggcaccggccgcctgcttaatacgcagtcatttcgggcatccggtacctacacaccaactgcgggtaccaaaaaaat

SEQ ID NO: 363 - DNA, 23656 bp, unknown
  Altogen  635822 strain
aggttcggctctgtgaagtgggagtcctcgccctttagggcggggagcagtcaaagacgaccgaaatcctgtagcctcaatgcgatagcttatttaaggtgatttcgccgggctgtgcaaccgtgtggagcaagatctgtggagatcaaactcgctacgtaggagcgctgcatgctgcgactgtttggataatcaatggtgagccgttgtccactgtttcccctcaccccaaccctctccccaaaaaggagagggggccggtacggcgctatagtcaggtatgagagacaatctgtaacaccaacgatcaagtcaaaacgtaggggcgctgcatgatgcgcccgttgtggtgtttactgctgggaaggtttggcggcgctgttctcccgtatttctttgacctgatcggcggtgaccggagcggcgttattcccccaactggtgcgcacaaaagtggcaatctgggccacctgctggtcgctcagacgccagccaaagtccggcatggtgagtccggtaggggcgtctatagtcatcggcgtacgtgaaccattcagaatgatgctgatcaccgaagcaggatcttccgccagcaacgccggattatgggccaactgtgggaaggtattgcgatagccctggccatcgctgcggtggcaggcggcgcagttgtccagataagcctgaccgcctgggttgccttggccggtgctgtagagtgccagcggctggttggccgttggcgttatttgctcatcccccgcaggtagcgatttcagataagcggcgatcgcctgcaaatcctcgtcgctcaggtgctgagtgctgtcttgtaccacgtccaccatggagccaaaggcggcaaatctgtcactgtggccggtttttaggaagcgggtcagatcttccgcgttccaactacccagcccgctgagcgcatcgccacgcaggctggcggcgggccaaccttccagcgtcccaccgctcagataggcgtcatcagtctggttcaacgccttctcctggaagccaatgccgcgtggcgtatggcaactgccgcagtgacccaatccttgtaccagataagccccacggttccattgtgcgctttggttagcgtctggctgataggcgccatcctcgcggaaaatgccgtcccacatcgccaacggccagcgcatattcagcggccacgggatatcgctagccttgttctgctgcaccaccggcgttacccgttgggtgaagtagagatacagatcgcgtaaatcctcatcattgattttggcgaacgagggatagggcatggccgggtagagccgagtaccatcgcgcctaatgcctttacgcagggcgtcggcaaacgcttgtaggtcgtaggcaccgatcccggtggttttgtctggggtgatattggtggaatagatcgcgccaaccggggtggtcatcttcagcccaccggcgaacgccatgccacctggtgcggtatggcaggcggcacagtcaccaacgcgggccagatattcgccatgagcgatttgcccaacctggtgggtatcctcggcggcctgagcgctggcgcttaataccagcaaggccagcagcgagggggttaatcctttcatcgtcttctccttgcgtatcaggcctgaaccaacgggccggggttgttcagatactgattacggatcgcttccgctgaataataggccagcgcaccgacgatcccggtggggttataagccaggttctgcgggaaggcgcaggcaccggtgacaaacacgtttggcacgtcccagcattgcaggtacttgttcaccacgctggtttttgggttgtcgccggtgattgccccgccggtagtgtgggtggattggtacgggcgcacgtcatagtgcgaaccgctgcccatcaccgaaattgccatctgcttcggctccatggccttggcgatgttcgccatcttgctggtaatgtgttgggtcatcttgatctcgttagccttccagtcgaaggtcatgcgcagcagcggtagcccataggcatcccgataggtgggatcgagatcgagatagcagtcgcgatagggcatcaccgagccttcagagccaatgctcatcgagtgcggataattatctttgatgccttgtttccagccactgccccaggtgggcgttcctggcggtaatgacatctgttggatcgggcggccaccggtgcgggtggcggaaatataggcaccaccgataaagcccaactcgccgtggtcgaagttttccgagttgaggtcgtcgatcaccgtgcctgcggctccggctccgatgaacgggttgaagtgggtgtccttatcgtaaaatagcgaaatgccgctgttcatctgataggcgtagttcttgccaacgaccccttcgccagtgacgggatcataaggtttaccgatgccggagagcagcagcagacgcacgttatgcagctgaaaggcgctgaggatcaccaggtccgccggttgttcaatctgctggccctgggcgtcgacataggtgacaccggtggcctttttgccgctgctgtccagattgaccttgataacctgcgactgggtgcgcaattcgaagtttttccgcttcatcagcaccggcagaatggtggtttgcggtgaggccttggagtacataaagcagccgaagcgctcacagtaaccgcagtagttacagggaccgagttgcacaccgtagggattggtgtaaggctccgagcagttggctgctggaatgctgaacgggtgatagccaagcgactcggccgccttgccaaacagcgaaccagaatagagctgcttgaggggggccgtgggatattcgctagtgcgtggcccttcgaacgggttgccgcctttgacgatgttgccttgcaggttaccggctttgcctgcggtgccacagaccttctcgaacttatcgaagtaaggctccagctcggtgtaactgagagggtaatcctgcaacaacatgccttctggcacccatttgtcgccatacttttccgtcactgtggtacgcattttcagatcggcgggcagggcgcgccagtgcatgccgttccagtggacgccagcaccgccaacgccgttgccgggcaaaaaggatccaagctgacgataaggcacggcaaaatccgctggcgtgtggcgcacggtgacggtttcatgtgccatctcctgctcgagtttcaggcggatgccataggtcaattcgtccgcaatccgtggataggcaaaatcagggtaggtatcgcgctgctcaccgcgctccagtgccaatacgctcaggccggtttcggtcagttccatgcccataatggcaccggtccagccaaatccgacaatgaccacgtctaccggtggcttttttatcgtgctcatttatgcattccttttgctggagatacttaccgggccaaggggataagcctgattgggatgatcgacccagtcggtgtaatctgcccgcgcaccagggaaaccgatcagcttccatgaggccatcgactggttaccgccgtgctgtggatcggccagataaccctctttggtgttttgcagcagttggctgaaaaaggctttgccgggcagggtttcggagtccagcccacctttctccagcgccgtcagaatctgctcttgctgggcatgatccagatccgcaaaggctttctggtactgctgctggcagtgcgcattgaggccgcgaatgccaatgcgataggtatcacgcggagtcagtttggactgatagcctaattcaggggcagagggaacaaacggcgggtgcatataccacaggccgccgtgaccataaggcgtttccatctgcttatcgataaagatcggcacgccttcttcgacggctccggggccattgctatcgctggggatcagtcgatcgcaggccgccagcagaaaacgccattcttcgttattgaaataagcgggaacatagtgagaagagatacccgccgccgaggctggcagaggcgtcatcgtcagaacgccggtacctccggctgcggccaatgggattaacgccaaagtctttttaagaaagctccgcctgggcggtatagaagggtgctgttgcgacatagttccaccttgaatatgtttcacagaaatgcccgcgtgcggatcaggtacgcactgccgctgtcttgggcagtaacgggcagagggagttgctatcccatgaccaataacaattagcaagctactggtatggtgattcaagtttaagtcttggcagctaaaacaaacaataaagcatctgtttcaaaacattttcttcacattgtttttgatttagatcatttcattaacaatttgccttgactattgcccctaacgagcttcggctgattggtctattcgctggattgaattggtctgtatgatgcgatctggcatcggtatatgctgctgtggagaacctgcttttgcagcaaccagacggaatacttttatggcgataaatcaatatggtcagccggtgggcgaacccttggcgcaatggcatgccttgccacggccgcaggcggtgacgctgacgggcaaattttgccgcctcgcgatgttggatgccgagcgggactttgccgcgttgtttgcggcttaccagctagcgccagacggccgtgactggacttacctgatgagggagcggccggatagcccgcaggaactgcgtgcgcatctggaaaacctgcaggccaacccggcgctggtcaatctggtggtgttcgatttagccaccgatatgcccgtcggcacggtggcctttatgcggattgaagaggctagcggcgtgttggaaattggccacgtctgctggtcaccgctgatgaagcagcgctcctgcgccaccgaggcgatttacctgatgctgcgccatacctttgacgagctgggttaccgccgctgcgaatggaaatgcgatagcctgaatgcgccttcgaggcaggcagcgcaacgctttgggttccaatacgaagggcgctttttgcaggcattggtcaccaagggccgcaaccgggataccgactggttcgccatgatcgaccaaaactggccccagatgcgtagtgcgttcgaaggttggctggctgacgagaattttggtaccgacggccagcagatacagcgtttgcaggcgtttatgccttgatatgtaggggggcgaacatgtggatgttcgcccctatgtagcttactgctcgctcagcgccgctttatttcttacctgcttggcctcgaagcgtgaaatccaccaccaggccagagccgagaacaccgcggtcatacagacgttgataaagaaggctttcatcagatcgacccccggcgggaatgccgatgccgtcatgctgaccacaaagatggtgatcagcaccgaaaccacgcccattccgaacttgcgcgaccccatgcggaactcgcgcggcgtatcgtcatgcttccagcggaacacgaagtaggccaccatgataaagatcggcggcagcatcgccgtacccgccgtcaggttgatcgcggtgttcatcatctgttgtaccgattcggaaccaaagccgttaaccaccaacatcacgaacacgaaggcaaattgccaccatgcagcacgtaccggaacgccatgtttgttcagctcggtggttttctggccgtaaacgcctttcgggatctcggagaagtggatcttcaccggcgcggaggtccacatcatcatcgaaccaaaaatggcgataaacagcacgatgcccaccagacggcccaccagcgtttcggaaatgccgaagtacttggccattccggtgaagatttccaccatgccgcctgcgtaggtcaggttttcacgcgcaacaaacacgttaaccagcagggaaccgacggcatacatcccgccgatcaccgcaccggcaatgataatcaccttgataaacgacttctggccccctttgacgtcattgaggtaggccgccgccgtttccgcaccgccagccgcctggaaaatccaacacatgatgcctaacgttgcccagttcaccgtcggcgtcatcgcctccagcgtaataggctgagccgggacgtgatcaccgctcagcgccatcaatgctcccagcacgtaaatcgcaaacagggcgaataccccataggcgacgacttcggcaatcttgcccagccaactggcacccttggtggaaatatgggtggtggcggcaaacagtacgatcgagatgatcgataccatcaccggggaaaaggcgtattcgcggcccataatggcgtacgacgcataggcaatcacgttaggcaacagtgatacaaaccagaaaaggttgacgaaccaatacaggaacgaccccatataggctgcacgggtgcccagaggctgttttaaccaatcgtacattcctgattccgagttcttattggcagacacaaactccgcgataataaacacaaagggaatgaagtagaccagggttgcaaacaaaaataccggggctgaactcaagcccagttcaatgttgttgttgacgatattgcgtacgttgaacaccgccgcaaaggtcatcgacaacagggcaaacttgccaatcgtgccacgtaaagaatcggacatagcgtcctccgatgaacaacatgaatgatgaactcaatctggattgagcgggagtgatttcccgcccgggtcgcttcataatcagcaggatcacttgttcaacatgtagccatcctcaatggtgacccgcagcaccacttttctaacccggttatcgccgtggaagcggtaggcctcccgattgtcaaaaatcgccagttgcccggcacgtaattcgcaggtttgcccggcgccttgcagatattcgcggtcggtttcatcgcggtaggcctcaacgggggtgagggctgatttctgcgcgaactccaccgtttcgccgccctcgaggtagtaatggatggtgaaatagcgacggttgccttcaaagggcgagcgattacaggtgacgccgtcttcaatcatatagaccagcgtatcgccgatggagtgcatcacgccgtctttgatattggcaatgttgtcaatggcttccacacaacggttccatttgcggccgtcccggtaaaccactttgaattgttccaggttgtctagtacgtgcatggatcaggcctcattggtggttggagtgaagaagtcattggcaaagtcatggctggccagcgcctgggcgctgacgtcaccggcttgcagcggtagcagggtcaggccatagcggaatggcgccatgtaaacccggtaggagtcgaggacttcgctgccccaggagttggaacccagccccatcacttggtggtcaaggttgagagtgatatatccacttggttgcagctcattggtatgctgtgcctgatgcaggttctggctggtgtactcccaggtgctgaaattgatcggttgctgcggtttgaccagcagaccggtaccgtgacgattggtgagcgcggcccagcgcacatgctggcggttaccgttgttttgtgggaacggatagtgctcgaacatctcggccaccgtggtctggtagatatcgatcaggttggcttgctggctgtcctgatagttttcttccgggccgcggccatagtagttcacccgatcaaagccgccgttaatgccgatatccagcccgatggccgggatcacgtacgggtaatcgccgtaacgctcgccgctgagttccacgttgagctggccttcggcattgatctggtagcggtagcagcagcgcatgccgaagtcgaagaccggcggggcgatgatgctggtcacggtgatttcaacgcggcctttggcctgaacgacgtccaatgtacggaagtgctcttgcatgatttgcagatgagcgggttcccacaggccctgatactcctgtttatggttatcgatcatcggtttgaagaagcttaacgccggagcagaggcgatgatttcttccccgtagctcacccaggaggtcagcttgccgttcaccttggagaaggtcagcgtaaagtcctggccgctgatgcagtatgccaggcggctttccgctacccggagaggcagggcgttgaggttggtataggcttctgtttgcgcagtgttctctttgagctggaactggtacaccgcgatatcatgattggccgggctgtacagcgtgctggagttcttgcgcacggtgaagttcacaaaggcttcgcgctcatccagttcaggcagttcaaggcggatttcccgtgaagagttggccgccagatctttcagccgcagaggcagcgttgccagcgtttccccttctgcgcggatttcggcggtaagggtgtaatcatccagattggtgaaccacagcttgttctcgaccaggaaggtgccaaggtgaggctcaagcgcacggatcttcaccggcgcaataacctgcttgtactccttcaggcccggccctggggtttgatccgggaagatcagcccgtccatgcagaagttgtagttgttcggatagtcgccgaagtcgccgccgtatttgtaaaacgcctggccttgctcatcgtgcgccaggatgccgtgatcgcaccactcccaaacgtagtggccctgaatatgatcgtgctggtaaaacacgttctgatattccgtcaggccgccggggccattgcccatggcgtgcgcgtattcacagatgatgcgtggtttggcgtgcgggtgttcaccaaactcgttcatcaacggcgcacgggtatacatggtggaaatgatatccaccacctcggcgtcgcggtcttcttcgtagtgcaccaggcgggtatcgtcgatggccttggtggcatggtacatcgcatggatgttgcaaccgtaaccggactcattgcccagcgaccacatcacgatcgacggatggttcttctgcgcgtgaacgtggcgcacgatgcgatcgacgaataccgtttcccaggctggatcgttggtgatgcggctcagatcgcccacgttggcaaaaccgtgggtttcgacgtcggtttcggccatcacgaacagcccgtaaatgtcgcacagctcataaaagcgcgggtcgttaggataatgggcggtacgtaccgagttgatattgtgctgtttcatcaggatcagatctttttcgacgcgatccatgcctaccgcacggcctttcaaatggtcgttatcatggcggttgacgccgtgcagcatcacatactggttgttgatgtagaacagtccgtcacgcaccttgatatcgcggaacccgacgcgctgagggatcacttccaatacggtaccgctttggtctttaagcgtgatatacagctgatagagataagggttttccgctgaccactggattggattggccagtttgatagcaaaatgggtctgcgtttgtgcgcctaggcactgctgtaccaggaggttatcgttatcaaacagggcatactcgaccacgtagtctgctagcggtgcgccggacaggttttcgatctccagtgcgcaagacagggtcgcgctttggtagtcatcggcaaaatcggtgcgaacggtcagatcctgcacgtgaaccggctctttgcccaccagatagacatcgcgaaagatgccagctgtccaccacatatcctgatcttcaatataggtcgagtccgcccactgcataacgcgcacggcgagcaggttttccccggagtgcacgtaaccggagatatcaaattcggcggtcaggcggctgcccttgctgaagccgacatactggccgttgacgtacacttcaaaataggtctcgaccccatcgaatttgatgatggtctgttttccactccactgttcaccaagtgtaaagctacgctggtaagcaccggtcgggttgtctgtcggcacgaaagggacatcgatcgggaaggggaagccttcatcggtgtattgcaggatgccgtggccttccatttgccacatgttgggtaccgtgatctggccccagtcagtcatcctttgtgaataaaagtcttcgggcaccagcagcgggttggtgaagtagttaaagctccattggcccctgagtgccataaagtggctgctgagggcgcgctgaaaggtttgggcacgcttaagcgagtcatatgagaagaagtaggcgcggggggccattcggttctcatgcaggtgttgaaagttttcccaattattcacgtcatctctcctggtctgaatgctgtaggtcgcagtcttggcatggaatgcgtcaatgcttggaatggattttagtaaaacatttactaaaatatagccgatgatttgttttactttaactcgatcacgctttatgcccgatgcgctggtggatctgtgatcgggttaaaggaatggcaaattggcgtggtaggcgaggaatagtggcagaaattgacagattccgaagtaaaaaacctcgtaattattagtattttttactaataattaggcgtttggatgcgagacaggtgctttagcgggcgcacatacggcgcccctacatggcgagaattgagtcgtcaggttacttggtggtttcacgcagttttaacttgctgggtacgtagacctgcagcggcagggcgcggccatcacggaatttctccagcagcaggttgaccccttggatccccatcatttccgagtggatacgcacggtagaaagtggtgggaaggtaaaacgcgcggttgggatatcgttcacgctgatcagggcgatgtcctgtgggattttcaaccccagctcatgaatgctgcgtaacaccccaatggcaatggagtctgaggcgacaaacagtgcggaagggtaatccttggttgccagcatctttttcgccagctcatagccggaggcgctagagaaatcgccacggtagatatcttgctcgcggactacgcctttcagccgcccatattctacaaaggccgcttcgcggatatccgctttattcggctcatcggcaccgccgataaaaccgatgcgtttggccccgtgctcaataaagaagtcgatgatctctttgctgatttttgtcaggtcgatatccaccgagtcgtattcggaaccgggctcattaaaatcaataaagcagatgttgtcggttaacgccgctgccttacgcaggatctcaggcgcaggtttactgacgatcagcacaccagtgatctttttcagatccggcagttggttatttttgtagcagttggtgagttcaatccccaacctttcacactgggtttcgatgccgtgacggatggaaaggtagtaaggatcgttgatttccatctcttgcttatagctgtatagcgccagcacgtgatgttgcaccaccgcgttagtcagatgctttttggcactgctggtcttgtattccagcttttcggcaatttccagaatgcgatgtttggtctcttctttgacgttgagcgtgggatcgtcattcaaaacccgggagaccgttgccaatgaaactcctgcttcggccgcgatgtctttcagcgttgccatatctatccttatctcacagcctgaacggcaaacttcgttatctggcattgtaagtgatgtcggcgaactttcatcagtttttagtaaaaaagtaaggatagcttatcgaagttgctgacataaagctgggatcgggaggggtttagcaatatgaatgccccctcccaagctgagaggggactgaacgtgtttcagatttccactgtcctgcccacatcactgttgcagttccctcacccagtgggtgaggggcaaccgttggcaataaccgcttacttcagttcgtcaaccatggtggtggcgcggccaatgtagtttgctggcgtcatggctttcaggcgggttttctcgccttccggcagttccagactatcgataaaggtttgcataccggccgcatccacgcgcttgccacgggtcagctctttgagcttctcatacggtttttcgatgccgtagcggcgcatcacggtctggatcggctccgcccgcacttccccgttgtgatccagctcgtccagcaggtgcgcacggttcacttccagtttgctgatgcctttcatggtggcctgataggcaatcagcgcatagcccaggcccacgcccaggttacgcagcaccgtggagtccgtcaggtcacgctgccagcgggaaaccggcagtttgctagccagatggcccagcaccgcgttagccaagcccaggttgccttcggagttctcgaagtcgatcgggttaaccttgtgcggcatggtggaagaaccgatctcaccggcaatggttttttgcttgaagtggttcagggcgatgtaaccccagatatcacggtcaaagtcgatcaggatggtgttgaaacgtgccacacagtcgaacagttcggcgatatagtcatgcggttcgatctgggtggtgtacgggttccaggtcactcccagcgaggtgacaaattcttcgctgaagcggtgccagtccacttccggataggccacgatgtgggcattgtagttgcccaccgcgccgttgattttaccgaggatctcaacgcgctctagctggcgatattgacgctccatccggtaggccacgttggcaaactctttacccacggtagacggggtagcgggttgaccatgggtacgtgacagcagcggaatatcacgatattccagcgccagccctttgatggattcgatgatcttgcgccagtgcggcaacaccacatcctgacgcgcggtatgcagcatcagcgcgtgggacaggttgttgatgtcttcagaggtacaggcgaagtggataaactcggacacggcgtgcagagcgggtaccgcttccactttctctttcaggaagtattccaccgctttcacgtcgtggttggtggtgcgctcgatggtcttgatacgctgggcgtcttcttcactgaattctgcgacgatcttatcgaggtaagcgtttgcgtcggcgtcaaaagcgggaacttctttgatctctgcgcaagcggccagtttttgcagccaacgtacttcaacctgcacgcggaatttcagcaagccatactcgctgaaaatggtgcgcagtgcgctgactttatcaccgtagcgtccatcaatgggggaaacggcggtcagtgaggataattccatcggtagcaactcctgggaagtttaacaatgagcaacgatattttgcgcctgcttgagcagacgattacgggaaaacattaactgcaggcggctaccgccaacctgctgccacagcacggcggcacgaataccggcgagcagggtggcacgaaccttggcctgcacctgcggattttgcaagatggcgggtgaacctgttacctgaatacgcggccctaatggtgccacgacatcgacatagataccggccagggcgctgatgatggtatctgaacccagttcataatgcgccaactgacgctccaactggctcaggcgctcgccgagcgtattcatcgccgttttgttggcgttcagcttgcgctccagcaccatcaggctgatggtgtagcgggtcagttcggcagccgggcctttgttattggcgttgagtacgccaatcaaggtttccaggcccatcttaaggttacgctcttcaccgccgaacaccgccagggtagaaggcggatccatctgcaacaggctgttgagtgaggtatggaaggcttcgccatccatttgcccttcgtgcgccaactgctgtaccagacgggccgcttggctaatcccggccatggccagcgtgatgtcgtaataattcttcgccacggttactcctgtatacgctgttcaataatgccgccgcccaggcagatatcgccctgataaaacacggcggactggcctggggtgacggctgcgaccggctcgtcgaagcggacttcgatgcgctcggcgtctagcggcgtcacggtgcagggaatatcctgctggcgataacgggttttaaccgtacagcgcagaggttgtgtcaacggcaggcgatccacccaatgcaactgctgggcgatcaggccgatagacatcaggcgcggatgttcgtggccttgagcgaccaccagaatattgttggcgacgtctttatccaccacgtaccacggatcttcgctgctgtctttcataccgccgatacccaagcctttacgctggccgagggtgtggtacatcaagccctgatgttcgccgatggtttggccgtcgacgctaacgattgggcctggctgtgctggcagatagcggcccaggaagtcgcggaatttacgttcgccgataaagcagatgccggtagagtcttttttcttggcggtaaccagttccagttgctccgcaatgcggcgtacctctggcttttccaactcaccgaccgggaacaggctttgcgcgacctgctcgtggctcagggtatacaggaaatagctttggtctttgttaccgtcgacgccgcgcagcaggcggcttttgccgtccacgtcctggcggcggacatagtgaccggtagcgataaaatccgcccccagatcttcagccgcaaactccaggaacgctttgaatttgatttctttattgcacaggatatccgggttaggggtacggcctgccttatactcttcaaggaacagctcgaacacgttgtcccagtattccgctgcgaagttcaccgtatgcagctcgatgcccagcttgtcgcagacggcttgcgcatcggccaaatcggtggcggccgagcagtattcctcgtcgtcgtcttcttcccagttcttcatgaacaacccagcgacctgatagccctgttgttgtaacagataggcggtaacggaagagtcgacgccgccggacattccgacgatcacttttttctggctgttgtctgacatggggatctcacgaacttgaacacgtactgtgcgataaaaaacaagcgcaggattttaccacgttggccgcctgcgcgcacggcccttatttgccgttaaagcggccagttaaagctggcaaccagcgacaacgggtagcgttccggctgctgataacaacggatcgtctcggccaccagcggtgaacgcaggttttcagcctccaggatctgctcggcggtcagccacagacagcggtcgatgtcatcgtcttgcggttcggtgggcagcggctgctccagctcaatcacaaagcagaagcgcagaaacggcgtgcggtctggcgcgatccactgatgcatccgcaggaaagactgcggcgtggcgcggatgccggtctcttcccacagctcgcgctcggcggcctggaccagcgtttcatccgcttcgagatggccggccggttgattccacagggctttaccgttgatggtttcttcgaccaccaaaaatttaccggcggcatgaaccacgcaggcaacggtgacgtgcggcttaaacatggcggttccttatagtgaatcgacggtctgccattccccaggttgcaagctccccagggaaagattgcccatactgtaacgaatcaggcgcagggtagggaagccgatatgtgccgtcatgcgacgcacctggcggtttcggccctcgtagagcgtgattttcagccaactggtggggatggtcttgcgttcgcggatgggcggagtacgtggccacaaccattctggttcttcgaccagctccgctccggcgggcagggttggcccatcggtcagcgtaacgccaaggcgcaatgcagccagatcgctctcctggggttcgccttccacctgcacataataaatcttaccggtgcgtttgcctggctgggttagctgcgcctgtagcttaccgtcgttggtcagcaccagtaagccttcgctgtcgcgatcgagtcgcccggcggcataaacatcgctgaaaggaatgaattttttcagagtgacgcggccggcttcgtcggtaaactgtggtaacacatcaaagggtttgttgaagataaccactcgccgcggcgcctgcgatttctggcgtgctgcgggtttactgcggctgaatcgtttaacttggtgatttttaacagagaatttagtcatggtctttgagatttcgaatgataagcgcattatagcctaatccgtttcggattggcgcgagctgaatattcaagtagtattgacacgcatcttacaaagcattaacaaaaattgcgcttgaagacagaaaggagaggttgatggaaagcaaagtagttgttccggcagaaggtaaaaagattacggttgatgcccagggtaaactggttgttccgcataaccctatcatcccgttcatcgaaggtgacggtattggcgttgacgttactcctgccatgatccacgtggtggatgcagcggttaaaaaggcctaccacggcgaacgtaaaatctcctggatggaaatctataccggtgaaaaatccacccacgtttacgggaaagacgtgtggctgccggaagaaacactggaactcattcgtgactaccgcgtagcgatcaaaggcccactgactacgccagtgggtggcggtattcgttctctgaacgtggcactgcgccagcagctcgatctgtacgtgtgtctgcgcccggtacgttattaccagggtacaccaagcccagttaagcagcctgagctgaccgatatggtgatcttccgtgaaaacgccgaagacatctacgccggtatcgaatggaaagcgggttctgcagaagccgacaaagtgatcaagttcctgcgtgacgaaatgggcgtgaagaagatccgtttcccagagcagtgcggtattggcgttaagccttgttccgaagaaggcaccaaacgcctggttcgtgcggccatcgaatatgcgatcaccaacgatcgtgattcagtgacgctggttcacaaaggcaacatcatgaagttcaccgaaggtgccttcaaggattggggctacgaactggcacgtgaagagttcggtggtgaactgatcgacggcggcccatggctgaaaatcaagaacccgaacaccggtaaagagatcgtggttaaagacgtgatcgccgacgccttcctgcagcaaatcctgctgcgcccggctgaatacgacgtgatcgcctgtatgaacctgaacggtgactacatctccgacgccctggcagctcaggttggcggtatcggtattgcccctggtgccaacatcggttccgactgtgcgctgtttgaagctacccacggcactgcacctaagtatgctggccaggacaaagtgaacccaggttccatcatcctgtccgctgagatgatgctgcgccacatgggttggttcgaagctgctgatttgattgttaaaggcatggaaggcgctatcgctgccaagaccgtgacttacgacttcgaacgcctgatggaaggcgctaaactgctgaaatgttcagagtttggcgacgctatcgttaaacacatgtaagtgtgatttagcgttgaatgataacgggaacctgatggttcccgttttttttaccctcaaaaaccctccgcaagactgtgcaaaagatgagctttttcatgcctaataatcaaccgctaaaatctcattcaaggagattagcgcctcggttttgaaagttattgtcgagatgattaacaaattcctggtaaccactacgcaaacaacgttggcatcagtacggcaaagaccgccaacgcggcgcgctacctctggggaattgctctattcatcacaaagatgactagctagttcagattgctgtttttctcactttcttttgcgttctattggcattaggatgttacaaaatgttaggtatggagacgaggatgtgaggaaagtaagtttaacttttattcttttaggaacggttcttttatcaggttgcacatatgatgtaacaggtaaaggttgggatcttcataggtttgaatgccctaatataactgagaatgtgaagcgtgatacggttggtaaatctgacttcatcaacaacttgcaacaaatggcctctctagctagtttattcaatgatataggggaaaaaaagctaaaaaccgctcaagctaaagcagatcaagcgtacatagaagaagtacacgcatgtacattaacaacgcgcgaaaatgctattaaattttcagaacaacaattccaacagttaaagtcagtgccaatgagtgaacaggaaaaagcagcacttatagatacatatgcagactgggtcacctttatgcaaaaaatatctgttaataatgatgccgctcaagaattaaataattttaaatccgctgcaaataaatacttgctaatgtgaggaaaaatgaaagtttataaatggattgccctcatccttcctgtcgctttatctggttgtttcattgccaacgttgaatccggaagggcgtataacgggatggatagtgaatacacctcatctatgaatacggaaattacggcggcatgtataaaaaatgcttggcaaaacagtgatgttcacatggggcttaccgcagctggtgtcagtcagcgaaatactggcgatatgataacactatatactcttaattatacagaaatagttgatgtttcaccttcagctgatggtaaaagcaaagtcgttttttaccataacggggatagaatttggggcagtaaaaaaatattaatttccggtataaaaggctgcctttaaacgatacccctatagttaatctaacttagccagcattaatgctggcttttttacatcctgagttcaattggcctaaaccttatttcaacaataaatagttacggaccgttagcgactacatccatccctgaaaaatgcgaactattgcgagtgtagtctgtgagaaaaaatgccccaaaaagtacacgaagtattaatagattaaataattttgcctgtcactggcacaatgcaaacgaatttcaattattccgtaaagtgcgattatagccatgcacattcggtgctgttatttttcaataataggatttatcatgagatttaaaaacttgttagctgtactattcttaacaactattgcttttagctcggcaacgatggccgaaggtaatggaagaatgactgtgtcaggtagtataattaagacacaaacatcctgctctttagctaccgagtctcttgaccagacaatcgcattagggcaggtggccgatgctgcactgcttgaaaacaatggctctggcaagtcgactgtacaacgattcaatattcaattggaagattgtgaagtttctggaggcaatagtgtgaccgttacttttgttggcgtggaaggaaaagagggacgccttggtattacaggtacggctagtggtgccagtgttgcgttggccgatggttcagggaatgtgcttgaactgggaaaacccagcaaaagcatttcgctccagaatggtaacaacatacttccttttacggtttacctccagggcgatggtgtgccgggaaatattcaagcgggtgattatcaggctgcagctggtttcatgctaaatttccaataaatcaaaaattcactattgaatatcgggagcctgatggctcccgttctttgtgtccccgacgaggcgggctaaaccatcgaactgaaggacgcttaggaagtcagagatgtgcagcgtaaacgaaaaaataaagcagatttttatactatcgtgattatccagctagccgtgtctttgtagtaacattctgtgttcaaataatcgaaaccttagagggagaaaaatgatcaagtatctgctctactcgctgtgtcacactgccagtaacgtataaaaagggaatgccacgtctggtcaactcttcgatataccattgctgttgtcgttgacggaatgactcatcctggcgtgtgccatcctgatggaaagcgaaatcgttagcacaaagcacgactgtgtcgtaatgtcggcaggctaactcctccaatgcagggtctgcactaccaaacatggccaacgagtaaaataacgttgtcagcggtgaagtatcacaaactaaatagcgatttgggcatgcagtcatctcccataaggtctgggtatgtgcaatatgcagcatgtcttcgaaaatcagatgtccctttctttgttcccatcgttcgcggccatactcacagatcgacacagtgtccagtgcagtagctaatgcgatactcaaggtactcttgcccgtagattccccgcccaggatacagatgcggtgaacaaaatgggcgtacacttcaggtgccatcaggtgtcgatattgatgaatgtctgatcgaatcagtgttcccgacacggctccgggccctagctcgcgcatcagacgtacatgtgaaccctgccgttgaaaacgtttgctaagcacctgagcgaatccagagccataatcttcggcagtgaatacggcttcaggaattatgtttaggtgctgtaggcacaatgacgcgacgaaatggcggtgtgaatcgtcatcgccttcattatggggcatcaggccaatgccccaagctaaagcgtcctcgggttctatcaccagaatgtgtgcttgtggaaaacgggtctgtagataggcctgccgtctagcagggccgaagccggggagttcaggtaaggaataactgataatgaccagcttctcgcatgcatcaagtgcggtgttaatcagtatttcatggccatgatgtaatggtgcaaacttgcccacgatcagcccagtagcaaagcgtttcatcttgctttcagctcctgacgccattgataaaggccgtaccaggcattacaccagaagatgagatagaggatcgccgtgatgtaaagctcacgtgaagcgtaaagcggtaccgcaatagtatttaccagcaaccacacataccagttctcgatccttctccccatcagcataaactgcgccatgatactgaatgtcatgatcaaggagtcgagccagggagaccaggcgttggtataagtgtgaagcacataggcataacaagaggataccagcaaggctgccagggcaaaaccgccaagcaaccaccctggggttttacggatatggattgccttaccttgattgccagttagccagttcacccaacctgcgatgctactggcaatgaaaaatagctgaagtgtgacatcggcatagagctgaacagagaaaaatacccactcgtagagtacgcaaccaataatgcctatccaccaagtatgaacattattacgggcagccatccatactgaagcggcgtaagtgctactcgcagctatttcaatcaaagacattgatatttattcctttaaacacagctagttcaccaacgtagcaagttggctattggataatcttggtctcccggtaggagacaacaaagctgcaatataagggagtatttgggcagctaagtcaacattggtgatctgatttatgggctttaggcacttcaaaaatagcgcaaactaagaatcggttgcataaaaccgagtgctgcatattggaggagcgcagctatatgggaaggtttgaaacctaccttatgctgaaggagtcaccgctgccggcaccgtgatcagcaatgtagtctattctaatcagtatcaatagtgagttgttgaaggggactcatccctttttaactcccgttgggctaggaggtttgatgaagctttttctcacaatatggcccgtcagattggcacttttgccggttctgtcgcattgaaaaggctttatcttgcctgcttactcaacgtgacgggtttcgttaatgtcagcttgaaaaccacgacgtgcagcgaatatggtggtcttaaactggcttggcatcgggttctgacatcgcaaatgacaaacgtggtgcgcctttagcgccagaggtaaaaatgaaggggataatacaaggtacgatcgggttgcttttgctcatgtccgccagcaatagtgcctgggccgcggtagtttgttcaccgttgaatggctccccacgtaccgataatgtgaccctgtctccttcagcgatctcggcggggagtgatcttccagtcggaacggtgatttatcaaggccgatgggtgagtggtgctaccggcctttcggtgatgtcctgcgactcgccgacggatacctcaatgtggcttaacattgcctggactgttgagcaagcgcctcttcccctcgccaactgggcgggtagccctttcggtggcgctgtctatcagaccagtatcccaggggtaggtattgccatctcccgcaataataatggcgatgcggcgatattaggccaacctaactatcagtttccggcggatgtgaacagcctggtgactgggggatcctataaaccttttctgactaacagaacgatctatgcaacgttgattaaaatcggtgccattacgccgggcagttacaccctcaatgggacgacactgccgactgccgcactgtcggttgtgaatccgataaattatccggcgacaaccgggcttcctattaaagcgtacattatcaagtttcaggggcagttaacggtatcagcccagacctgcaccacgccagatgtgaatgttaatctggggagttacgacacgcggcaatactttaccagacagggggcaaccactccgtgggtcgatgcttcgatcaccttgaccaactgcccaaccttctatggttattataatgccgccaacagtacattaatgtttgactatgctatcggctccgggcaggtagccaactcaaccaataatagtattggcgtgcgactgaccccgacgacttcggtgattgatgctgccaatgggattatggctattgactctacggtacccggtgcagcatcgggggtggggatacagctcggttggggaaatagcagccaaacgccgacgctgtttaactttgcggcagagcagtcagtaacgctaccaaaagacggtagcccgacaattcgtgttccattggctgctcgttatattcaaaccgcttctgggacttcgccaggcaaggcgaacggcaaagtcacgtttacgattaactattactgattaatgaaagatcctacgggtaagcgaagctatcgatgtatcgctgccaaccccccttaatactgtacctttcttttatatatcaatggaattgctgtttttcttatatgatgtttcagtgctgctagaacaattaagaaatgcgtttttttatataagaatttaatgtaacttattgattaatatgtgtataagtgattttttcctgcgttttatactacttcactaagaatattctgcatttggcggtaatatttattccaacagcaaagcagtatgcagtaccggacggatggttcgtgataggtaagggataaaggtacgctgaaaggctttcaacagggaactgccgttcattgatatcttgtgaatgtagtttgtcttcatttaatttgataacgccagttattgccctgcattttaaatgctgtgttattgccgacata

SEQ ID NO: 364 - DNA, 276 bp, unknown
  Altogen  635822 strain
tcccatagggagagggagctgattcggcgttatggttgggtatggggtagggttgtggctgtttcaacgctcattgccaaaagtgatgaggttggtgcggtgctgagtttagagacagaacttgaatagtggcactctcggtcccctgtggaagcgagaatggtgtcgtaatcaggtaccgtgatcaataaaagagaactgattcggtgcggtggtcaggtagatttctgcaaccgaaatcgaactcaccctgaccctctccctgtgggagagggt

SEQ ID NO: 365 - DNA, 6965 bp, unknown
  Altogen  635822 strain
tcgacgtattccgatggccagtaacctgcacgggttcgcggtgggatcagcgccttgattttcttacgtcttagctcgtcgtggcaccgcctggtgtcgtgagcaccgtcggctgaagcaaccctgattttgcggtgggtctggcggataagcgccgggaatgcctccgcgtcggtcacgttgttcagggacagatcagcgcagataacctcgtgagtatcggtgtccacagccaggtgcagttttcgccagacgcggcgcttttcctgaccgtgctttttcaccttccactcgccttcaccgaagacttttaagccggtggaatcgataaccagatgagcaatctcgccgcgcgtggggttcttgaaagggatgctcacggacttggctcgccggctgacgcaggaataatccgggcaacgaagcgggagcttcattagagtaaaaatggaatcaatgaatccctgagcggcacgtagcgtgaggcgaaagacacgtttgagcatcagtacggtggaaatagccagttcagaataacgttgcggacgaccacgcgaagagttttttggcttgtcgtaccaggcctggatggcagactcatcaagccaaaatgtgagagacccacggtttataagcgccttgttgtaggctgtccagttggtgattttgaacttctgctttgccacaggataccactacagggtcatggatgtggtgatctgatcctgattgaggtcaaaagttcgatttattcaacaaagccgttgggaccatatatccggcgtcattagtgggttaagttacccgcgctatgatgttatccaaaccctgtttccttatcactacaccggcatatgtcactccaatcgataccaacaaccctgatttttttcatgtgatgttactctcagattaatgcagtcagcaaaagtatggcacgggctacgttaggaaggggcgtccatcacataattacagatgatctgtccatcggaaaaacgcttcttcatgggtgtgtcctcatgttgcttatgaagacattactaacatcggggtgtgttaatcaacggggagccggtcagtacgtatcgatggagcgtgcgacaggtctaacccacactgacatttcactcaatgttagccgataactaaccactcccaccgggaaacatttccctggaggatgttatcctcaatgttcggatactgtcacaaggaagtttaggtcattatttttccattaactcactatttagtgaaaaatatcggcatttagaatttcacgatagtatttttaatgtaggataagataaaaaaaatcataactgactgtttatattgaaaatatttaaacaattactgcttaatgtatactagcgtaaaattctttacttattaaaatatactcggatttgttttgtgacatgccttttattcgatgttagatttatacctgcagttagggcaagattgtttttttaatttccgctctcatcttgcctattttttaaaatagaggtgattagtatgaatagtcgagtgaaagtttttatcagtggccttgttgtgctcgttggtttatctatggcttatgcaagtgcaaatggaggaacaataattttcgtaggtgctatcactgaaaagacatgtactgttaatacgaaatctaataaattgagctatagctgttttcgtggaggtaaagaacgtactggaacacttgacatatcacgggcgctttctgtcaaacccgttaaattagctgcgaatgttcatgcagagtgcatagattcagtgggtaccacatgtacaagtagcattatattgactaactatacctgataacatcatagatgttaatgtaagtaaatcatgatgtctttttttatccagaagttcaatggttgattttaatatcaaactccgagggttttatttaacttgtatgatgtgtcaaaataaaatggtcgagagataaatatcctctctgaagctcgatgctgtctttaaatttcctatttattataggtaaggtatatcgattatgaaaaaaattattccagcattaatcttgagcaattgttttactgctgtcgtatatgctgccaatggaaccattttttttaatggttcagttagtagcgtcacatgctcgattaacggtcaaacatcaagtgggaccgctaatatggccgtaaccttgccaaccgtcaatgcctcatcattggttaatgctggccaggttgctggaactacgcctttccagattgtgctaggaaaaactggtgaaacggcttgtgtggatggctctattgccaaagtacagtttgaaagtggtgctggcgtcgacactgctacggggatgcttaataacactgcctctattacacccgctagcaatgtgaaggttgctgtgctgaatgcggatgatttctcacaaattatggtgggctctagtgcacctaacaatcatgctgcagtaactctttctaacaatcagggcactctgaactatgttgcagcctataaaactgtcaacggtggtgtaaccgcaggttcggttattgcttctgtcgcgtattctgtggtttacaactaaccgaggttctgtggactgaccccacgacagtagacaaattctgccctcacgacgaggcctgttcaaaggcctccggacttacgccaccgagatgactgtggcgccgggtacggttgtacaacacttcaatataatcgaagatatccgcccgggccatgtcacgggttttatatattcgctttctgacacgttctttttttagcgaactgaagaacgattctgccacagcattgacgctcctatgtcaacggccgcagttgggctcgcctcaaatcagttaaaataagcggataaagctctcgtacgatgtagcgtttaaggcaacgtaaaatttcttttgtcgacagtccttctcctgttcgacgttgcacatagacctttgttcgaggatcgctgcgcatgcgtaccagggcggttgtccacaccgcattattcgcctcacgtgaaccaccgcgattcaggcgatgcctgatggttttacctgaggatgctggcaacggatttacactacaaagtgacgcaagtgcagcttcattttttaatcgttcaggatttgaaccgtaccgggttttcgggagactaaactctcagtgaaaggagacctgaaatgacatccaaacgagcaaaccgttacccaccagagctgcgtgagcgggctgtccgaatgctgctggaacagcgcagtgaatatcactctgaacatgccgccatcaactccatcgcgccaaaaattggctgtagtcccgacacactcagagcctggctgcgtcgacatgaacgcaataagggtgcaggtgatggcgggctcacaggcgatgagcgtcagcgactcaaagagctggaggttcgtgagctgcggcgcagcaacgatattctgcgccaggcgtcggcttattttgcgaaggcggagtacgaccgtctgtggaaaaaataatgccgctgctggataccctcagcggtagtcacggggtcggaccggtatgtcatgagctgaatatcgccccgtcgacgtactaccggcaccgtgaataccgccagcatccggagaaacgtagtcagcgtgaccaccgtgacgaccagttgaaaccggaaatacaacgagtgtatgacgaaaactacagcgtctatggcatccgtaaagtctggaggcagttgcagcgtgagggcttcagcgtggccagatgcaccatcgcgcgactgatgaaggctatgggtctggccggagttcttcggggtaaaaaagtgcggactacggtcagccggaaagacgttgcggcaagcgacagggtaaaccgccagttcgtggcagaacggcccaatcagctttgggtggcagattttacgtacgtgagcacctggcagggattcgcctacgtggcgttcgtcatcgacgtgttcgcaggtgttatcgtgggctggcgggtgtcatcgtcgatggaaaccacgttcgtactggatgcgctggagcaggctctgtgggcccggcgaccgtccggcactatccatcactcggataaaggctcgcagtacgtatcgctggcgtacacgcagcgactgcaggaagcggctcttctggcttcaacgggcagcacaggtgactcttatgataatgccatggccgaaagtattaaggggcagtataaagcggaggtgatacaccggcagtgctggaaaaaccgacaggaagtggagctggccacactggcatgggtggactggtacaacaatcgtcggctgcttgagcggctcggccatatcccaccagctgaagcagaaaaagcatattacgcttccatcgggaaaaaggatctggcagcctgagttcccggacttaactctctcccacaaaaccggtacggttcatcttagtcgttggggattgtctccggcagtgatcagcaactgcgaagcgctttcgtatccaatagcattacgtttaatcagttcaggtgccagctcgtcgacaattgccgcaatcatgacatccagatcagcgatttcgtcatgtaactcgagatagcgtcgggcaagggactttaatgcaatgcgataaacgtttgtaacattgtggtattcactggcatcaggcctacaggaccccagagtcctgatgagctgcatacgcgtcatatttctgagctgttcacgtaattcatccggagcagagataatattggaatggataatctggagagcgactctgcgggctgatatcgctgtttttcggcaagtttttaagacccgtagagattcaatcatgccatcacgtgttttgggggtaactgtcctgatacccgagaatgctgcatgagcagcacactcagcatcaatcgtgtcacttttaccccgtttgcgtcgttccatccgatctggcgcagtaacctcaagaacttctaaccccgcattctggaaatagcgaagcagccctgagccataggtacctgtgcactcaacgccaattctctttaacgccccaaatgaggtcatccataccagcatctgccggtaaccttgtcgtgttgcggaaaaatactgggtccccagaactttattgttctgatctacgacagcggcaacgtgcaaatctttatgtgtatccacgccacccacaacggtggcttcggtaacgttatcagccatgacaaaactcctgtgaggaaacagagttgaatctccagacagataacccggacaggacagtaatgagacaagccgtcaggcccttcttgagtcacgcgcaccggtgaggagatgcctcgcatgaaggcgcttccggcaaccgacgagtccagggcaagacacaaaaggtcgatcgctgtgtgagtcaggatgcgggaaggtcttcactgcatcagtaatcacaccaatctgtttaaacggcaaactgagtgatgacaaaactgacaccggcattattactatcgctgtgcataatgacgctttccgcaggtttacgccgccagacggccatcagcaatgcatccagtgcaagttcacgcgacagcgtcggtttcattgaccaacccaccacattacgtgcaaagggccaggtagagcaagccctgccaggtgcgtatataggtaatatgtagtggtcaagtaaaactggccacggttttataagttgcgtggtatcttctctctgactcatcaggtgtcagacctccgttatattggtgaggtctgaacgtgctgtagtaacccattatgtaacgattgacttcttgtcgagctgtttccggcgtaccgtagcctccttccggtatccattcgcttttcagactacggaagaagcgttccatcgggctattatcccaacagttccctctccggctgacgctctgttttatctgctttttccagagaagttgccggaacttcaagctcgtatattggcttccctggtctgagtggaacatcaggcccgctggcttattacggctttcccaggccatttccagggcgttaataataagctctgtatccgcaaccggtgatattgcccagcctacgggtttacgggcgaacaggtccaacaccacggccaggtagctccacttctgcccggtccagagtagagtaagaggctgggcgtagtcggactatttccctgcctctcctccccgaaccggacgtgcacctttcagcgcatccggctctccatttaaacgctggcgaacgccattgccacttccggataacgcgatgtgtatgtgtttctggcttctgttctcagataaggattaccttcaggtaagcgccaacggaacagcttcttgccttgcccgaccatccgatacagtatttcaccgctgagcttgccgttattggtcttgccaaataaaacccaggtcttactctgaccgggttttggggccttgcaccattggcgcatcagggatttgatacctgtacggtatttacgggccagccagtgagccagtttccagaacaccacacgatcaatataactgaacactttggccttaaaatcaacgaactggtagaacgcagcccagcctttcagttttcggttgagcatcccaaccctatcgattttgctttcgctgtaattgcctgataacagcgccgtcagtgtcgctgcgaagtttctggctttgtcccgagggatcgtcgtgaccacccgcatatcaccatagcggctgcgtttgcggatgatccgatgacccagaaagataaaaccctcatttacatgggtgattttagtcttgtccatgttcagcctgagcttcaggctgtcttcgagtacgctccggcattcctccctgatggcctcagcctgtgccttggtgcctttgacgatgatcacaaaatcatcggcgtatcggcagtaggcgacggcggg

SEQ ID NO: 366 - DNA, 3407 bp, unknown
  Altogen  635822 strain
tgggagagagttagggtgaggggactttgcttgatattacaaaaacttatttaacctgcataccaggctgtgcgccgctgtccgggctgagcaggaagatctccttgccgccagggccagccgccatcaccatcccttcggaaacgccaaagcgcattttacgtggcgccaggttggctaccataatcgtcaaacgcccttccagcagtgaaggatcagggtaggcagagcggataccggagaagatctggcgtgattcaccgcccagatccaactgcagcttcagcagcttgtcggaaccttcaacaaactcggcgctcttgatcagcgcgatacgcatatcgaccttggcgaaatcgtcaaagctgatggtgtcctgaatcggatcgtctgccagcgggccgctgacaactttctggctggcggccagatcttcttttgatgcatttaccatttcattcactttgtcgagatcgatacggttgaacaacgccttgaaggtgctcacctgatggcccagcagtggctgctcaatgccatcccagctcagttcgcagttgaggaacgcttcggcacgttcggtcaacgcaggcagtaccggcttcaggtaggtcatcagcacgcggaacaggttgatgcccattgaacagatagcctgcagatcggcgtcgcggccttcttctttcgctactacccaaggggcctgctcatcgacatagcggttggccagatcggccagcgccatgatttcgcggatcgcccggctggtttcacggctggcataggcctgcgcaatgctggtggcagcatcaacaaaggtctggtacagcgcagggtcggccaggtggtcggctaactgcccggcaaaacgcttgttgataaagccagcgttacgggaagccaggttgaccactttgttcacgatatccgcattcacgcgctgcacgaagtcttccagattcaggtcgatatcgtcgatgcgtgaagagagcttggcggcgtagtaataacgcaggcaatcggcatccaggtgcttgaggtaggtgcctgctttaatgaaggtgccgcgcgacttggacatcttggcgccgttcaccgtcacatagccgtgcacaaacaggctggtaggcttgcggaaatcgctgccttccaacatcgccggccagaacaggctgtggaagtagacaatatctttaccgatgaagtgatacagctcggtagcggagtctttacgccagaactcgtcgaaatccagatcgccgcgtttgtcgcacaggttcttgaacgagcccatgtaaccgattggcgcatccagccagacgtagaaatacttgcctggggcatccggaatttcgaagccgaaatacggcgcatcgcgggagatatcccactgttgcaggccggactcgaaccattcctgcatcttgtttgccacctgctcttgcagtgcgccggagcgagtccaggcctgcaacatgtcgctgaaagcgggcaggtcgaagaaatagtgctcagaatcacgcatttccggggtagcgccggaaaccacggatttagggtcgatcagctcggttgggctgtaggttgcgccacaaacttcgcagttatcgccatattgatccggagatttacatttcgggcaggtgcccttcacaaaacgatccggcaggaacatgcctttctcgggatcgtaaagctgagaaatggtgcgtcgcttgatatggccgttctctttcaagcggccatagatcacacctgacagttcgcggttttcttcgctatgggtcgaatgataattctcatagctgatgccaaaaccggcgaaatcctgttggtgctcgcggctcatttccgcgatcatctcttctggcgggatacccatctgctgcgctttgagcatgattggcgtaccgtgcgcgtcatccgcacagatgaaatgaacttcgttgccgcgcattcgttggtaacgaacccagatatctgcctggatgtgctcgagcatgtggccgagatggatggaaccatttgcgtacggtagcgcgcacgtcaccaataattttttcgcgacttgagccataatgaaaagttgctttctttaatgagtgaaaagggtctttgatgttacccgatcgcgctctctgctgctagggcggtttctttcgggttatacgagcgagttaccctgcagttctgatatgcttatcgggttgctacccattacaaaatcaaggagccgggatgaacgccaaatcccctgagcagaccaaccctgaagttctgcgcgccctggtgaccggagtattggccgccttcgaacacccgacgttaaaaaacaaccttaccgcactgaaagccattcaccactgcacgctgctggacaatgtcctgcatatcgaattggttatgccgtttgcctggcaaagcgggtttgaggcgctgaaagaatcggtaagcgccgaactgctgcgcgtgaccggcgttcaggctatcgaatggaagctgaaacacgatatcactaccttgaaacgtgccaacgaccaggccggtgtaaaaggcgtgcgtaacattattgccgtcagttcaggcaaaggcggggtggggaaatccagcaccgcggtcaacctggcactggcgctgatcgctgaaggtgccaaagtggggatcctggatgcggacatttatggcccgtcgatccctaacatgctgggcactgaacatgagcgcccaacctcgccggacggccagcatatggctccgatcatggcgcacggtttagcgaccaactctatcggctacctggtgaccgacgacaacgccatggtgtggcgtgggccgatggctagcaaggcgctgctgcaactgttgcaggatacgctgtggccggatctggattatctggtgctggatatgccgccaggcaccggggatatccaactgaccctgtcgcagaatatcccggtgaccggtgcgctggtggtgacaacgccccaggatatcgccctgcttgatgccgccaaaggcattgtgatgtttgaaaaggtgcatgtgccggtattgggcatcgttgagaacatgagcatgcatgtgtgcagcaactgtgggcatcacgagccaattttcggcaccggtggggcagagaagctggtgcagaaataccatagccgcctgttggggcagatgccgttgcatatctcgttgcgagaagatctggatcgcgggcaaccgaccgtggtcagccgcccggacagcgagtttgccgagatgtaccgtcaacttgcggggcgtgtcgcggctcagatgtactggcaaggggaagctatccctaccgagatctccttccgcgctctgtgattgccctgcattaaattgttagtttagtgctcttcccctcaccccaacccttatgt

SEQ ID NO: 367 - DNA, 5937 bp, unknown
  Altogen  635822 strain
  misc_feature (5812)..(5895): n is a, c, g, or t
gtgtttgacaactcctacgatcgcggcgagccattgtcattccgtctggacggcgtgatcccaggctggaccgaaggcctgaagcacatcaagaaaggtggcaagatcaaactggttatcccaccggcactggcctacggtaaaaatggcgttccagggatccctgccaactccacgctggtgtttgacgttgaactgctggatgtgaaaccggcagccaaggctgacgacaaaacagaaaaagcggctgatgaagctgctgcagacgctaaagccaaataagtctgagattttcccaaccgccgcgaatgtccttcgcggcggttttcatttctgcgctaccaagaatgcaaaatatcctgcaactttactccctgtctttactgatcgcttgacgcctgccgggcatcgggcttaacgtcaatatcacgcgcaaatgtaagaaccagcatctgaccgttttgctagactctgggtctgaacttatgaatcatgcgcctgccccttagggcgtgtacctaaaactgctcccggcagcgattgcttcctgcgcgagccgttttagttgcgtcccctggcacaggcgatctatgtaggtggtatcttcgatgtcaaattcgcttttatccagcgaagccagcgaacttgatttgctgaatgagcgtccgtttagtcagacggaccatgaaatcctgaagtcgtatgaagtcgtggtcgacgggctggcgatgctgattggtgggcactgcgaaatcgtactgcactccctggaggatttgaaatgctccgccgtgcgtatcgccaatggcgagcacaccgggcgtaaaatcggttcgccgatcaccgatctggcactgcgtatgctgcatgatatggcgggcgatgacagcagcgtctctaaagcctatttcacccgggccaaaagtggcgtgttgatgaagtcggtgacgattgccatccgcaatcgcgaacagcgggtgatcggcctgctgtgtatcaacatgaacctcgatgtgccgttctcgcagatcatccagacctttatgccgccggaaacgcaggaggtggcctcctcggtcaacttcgcctcctcggttgacgatctggtagcgcagacgttggagttcaccatcgaagaggtgaatgccgatcgcaacgtgtccaataacgccaaaaatcgccagatcgtactcaacctgtacgagaaaggcatttttgacatcaaagacgcgatcaatcaggttgccgatcgtctgaatatctccaaacataccgtttacctgtatatccgccagttcaagagtggcgatctgctgggcaatgagcgctgatgcttaactactgcctattggtcaccggcccggcttatggcactcagcaagcgagcagcgcctggcagttcgcccaggccctgttggcggcaggccaccgcattaccagcgtctttttctatcgcgaaggggtgctgaatgccaaccagctatcatctccggccagcgatgaattcgatctggtgcgtgcgtgggttgatctggcccagcggcatagtgtggagcttaacgtctgtgtggcggcagctttgcgccgtggcgtagccgatgagcaagaagctgcgcagctggcgttggcggccgctaacctgcagccggggtttaccctcagcggtttgggctcattggcagaagcggcgttgagcaacgatcgcctggtacagttttaagtgagcagaatgaagcgagttgcgtttgtatttacccaggggccacatggcagcgcttctggcagagaggggctggatgcggtactggcgacgtcggcactgagcgaggatatcggcgtgttttttgtcggcgatggcgtgttgcaactgctgccgggccaacaacccgaaaagatcctggcccgcaattacatcgccacctttggcgtattgccgctgtatgacgttgaaaactgctatctctgcgcaacggccatccaggagcgcggcctacaacaggtcaccgactgggtgctgaaggccgaaattctgccgcctgatactctgcgccagaaactggccgcttacgatgtggtcatgactttctaggaaattttgatgctgtataccctcagccattccccaacccgttgcgacctgcctgcattgttaagactcaccagagaaggtgatgccttgctgttgttgcaagacggcgtgttggctggcctggccggtagcgccagccttgatttattgctcaatgcccccatatccctttatgcgctgcaggacgatctggatgccagagccctgtctggtcatttttcacacaaaataacgctaatcggttatactgacttcgttgtgttaaccgagaaacaccacagccaaatggcatggtaatgcgtgtgatgttgtatatttcttgacacctctaccagtcagccataaaattctgcgtcctcgtactgtgccaaaagtgcatacgggggatttatcacatgtttacgaagcaaaaaacgaagcaaaacccaggagctttttttaatgactacgattaatcagctggttcgcaaaccacgctctgtgaaggctgctaaaagcaacgttccagcgctggaagcttgcccgcagaaacgtggcgtatgtactcgcgtatatactaccaccccgaaaaaaccaaactccgcactgcgtaaagtttgccgtgtgcgtttgactaacggtttcgaagtgagttcttacatcggtggcgaaggccacaacctgcaggaacactccgtaatcctgatccgtggcggtcgtgttaaagacttgccaggtgtgcgttaccacaccgtccgtggtgcacttgactgctccggcgttaaagaccgtaagcaagctcgttccaagtacggcgtgaagaagccaaaggcttaatggttctccgttaagtaaggccaaacattttaatgtcaaaataaactcgtagagttttggacaatcctgaaattttcaacggagtatttccatgccacgtcgtcgcgtaataggccaacgtaaaatcctgccagatcctaagttcggatccgagctgttggctaaatttgtaaacattctgatggtagatggcaagaaatctactgcagaagcaatcgtctataccgcgctggagaccctggctcagcgttctggtaaaggtcacctggaagctttcgaagtcgctctcgacaacgttcgcccgactgtagaagttaagtctcgccgcgttggtggttctacttaccaggtaccagttgaagttcgtccggttcgtcgtaatgccctggcaatgcgttggatcgttgatgccgctcgtaaacgtggtgataaatccatggctctgcgcctggcgaacgaactgtctgatgcagcagagaacaaaggttctgctgttaagaagcgtgaagacgttcaccgtatggcagaagccaacaaggcgttcgcccactaccgctggtaatccacgcagtagttatgctaaccaagtgggcgcttcaagaagccaacccgcttggtttcaccgaaccgcctaaggcaatagaggaatcaaatggctcgtacaacacccattgagcgctaccgtaatatcggtatcagtgctcacatcgacgccggtaagaccacaactaccgaacgtatcctgttctacaccggtgtaaaccacaaaatcggtgaagttcatgacggcgccgccaccatggactggatggaacaagagcaggagcgtggtattaccattacttctgcagcgacaactgctttctggtctggtatggccaagcagtttgagccgcaccgtgtaaacatcatcgacaccccagggcacgttgacttcaccatcgaagtagaacgttccatgcgtgtgcttgatggcgcggtaatggtttactgtgctgttggtggtgttcagccacagtctgaaaccgtatggcgtcaggctaacaaatacaaagtgccacgcatcgcgttcgttaacaaaatggaccgtatgggtgccaacttcctgaaagttgttggtcagcttaaatctcgtctgggcgcaaacccggttccattgcagctggcaattggcgcagaagagaaattcaccggtgttgttgacctggtgaaaatgaaagccatcaactggaacgaagctgatgcaggcgtgaccttcgaatacgaagagatcccagctgacatgcaagaactggctgctgaatggcaccagaatctggttgagtctgctgctgaagcctctgatgagctgatggacaaatacctgggcggcgaagagctgaccgaggaagaaatcaagaaagctctgcgtcagcgcgtgctgaacaacgaagtgattctggtaacctgtggttctgcctttaaaaacaaaggcgtacaggcaatgctggatgcggttgtcgaatacctgccagcaccaaatgacgttgaagctatcaacggtattctggacgacggtaaagataccccggcagtgcgtcattctgacgactcagagccgttctctgcactggcgttcaaaatcgctaccgacccattcgtgggtaacctgacgttcttccgtgtgtactctggcgttgttaactccggtgacaccgttctgaactccgtgaaggccgcgcgtgagcgtcttggccgtatcgttcagatgcacgctaacaagcgtgaagagattaaagaagttcgtgcaggcgacatcgctgcggcaatcggtctgaaagacgtaactaccggtgatacgctgtgtgatccaaatagcccgatcattcttgagcgtatggagttccctgagccggtaatctccgtagcggtagaaccaaaaaccaaagctgaccaagaaaaaatgggtctggctctgggccgtctggcgaaggaagacccatcattccgcgtatggactgacgaagaatcaggtcagaccatcatcgcaggtatgggtgaacttcacctggatatcctggttgaccgtatgcgtcgtgaatttaacgttgaagcgaacgtgggtaaaccacaggttgcttaccgtgaagcaattcgcgcgaaagttactgacatcgaaggtaaacacgccaagcagtctggtggtcgtggtcagtatggtcatgttgttatcgacatgtacccactggagccgggctcaaatccgaaaggctacgagttcatcaatgacatcaaaggtggtgtgatcccaacggaatacatccctgccattgataaaggcctccaggagcaacttaagtctggtccactggccggttatccggtagttgatctcggtgtgcgtctgcatttcggttctttccacgatgttgactcctccgaattggcgtttaaactggccgcgtctatcgcctttaaagatggctttaagaaagcaaaacctgttttgcttgagcctatcatgaaggttgaagttgaaacgccggaagagaacactggtgacgtcatcggtgaccttagccgtcgtcgtggtcaactgaaaggtcaggaatccaacgctactggtgttcagattcacgctgaagttccgttgtccgagatgtttggatacgcaactcaactgcgttctctgaccaaaggccgtgcttcttactccatggagttcctgaagtacgatgatgcgccgaacaacgtcgctcaggccgtaattgaagcccgtggtaaataagctttcgggtttaacacattgatcagtgctccctccatgaggggggagcaaaagagttaaggaatatagccgtgtctaaagaaaaatttgaacgttccaaaccgcacgttaacgttggtactatcggccacgttgaccannnnnnnnnnnnnnnnnnnnnnnnnnnnnnnnnnnnnnnnnnnnnnnnnnnnnnnnnnnnnnnnnnnnnnnnnnnnnnnnnnnntaacgcgccagaagaaaaagctcgtggtatcaccatcaacac

SEQ ID NO: 368 - DNA, 26285 bp, unknown
  Altogen  635822 strain
  misc_feature (17830)..(17853): n is a, c, g, or t
  misc_feature (24927)..(25016): n is a, c, g, or t
cgcttatcgctataatcagggcgcgggttgacagtagtttattggccgtaataggctttggctccgtgcttacgtaagtaatgtttgtctaacagcgtggcttgcattgcggggatctgtgggctgagttgctgggtaaacagattcatataggcgatttcctccagaacgactgcattatgcactgcgctggccgcatctgttccccagctaaaggggccatggctgttgaccagaactgccgggatctcattagggttgatgccgagctgttgaaaggtctcgataatgaccttaccggtttcatgctcgtattcgccagcaatctcctcatcctgcatcagacgggtgcagggtatggtgccatagaagtagtcggcgtgggtggtgcctaatgccgaaagcgactttcccgcctgcgcccagatggtggcatggcgggaatgggtgtggacgatgccgccaatgtcggggaaggcctgatacagagcaagatgagttgccgtatccgaagagggctttttatttccctcgacgattttgccgctcgccagttcaaccaccaccatatcttctatctgcatagtgctgtattccacccctgagggcttaatcaccattaacccgctttggcgatcgataccgctgacatttccccaggtaaatgtcactaattgatgtttgggcaataataaatttgcctcaaaaacctgccgttttaattcctgtaacatgagttacctcgtgagatatctgttgggcggtggggagtatcaccaattttttctctgcgcactcgggtaaagacgctagcgtcaataaagcttgagtacctggcgaataatattatttttctcaggttaaaatactgcgcttgccaataggaataaagcgcacagcattggagtggaaagtaaatggttatatttgggcgaaatcggtcacattcgggcattgattttgtgcctgattgtgaccgtttgtttttggtaatggctttctataatgtctaatgctcttttttatgtgattttagtcacaattaaagtgtcttgtgttctgttttgttgcaatttattgttaataaaatcacataataatgagtggaaaagtcagggaaagagtttcttgaattgagtcactttcatgccagctaaaaaatatcattatagcgttaagccaatctcggtatttttagagggataacatgttacaagctgaacgttataagctcatttgtacgcacgtacaccaacagggttctgctttggtaactgagttatccgtggtctgtcaggtatcgcctgagacgatccgccgcgatttgcgggtattagcgaagaacaagaagctaatccgcagctttggcggagccgtggcgctggatgtacatgaagtaccagtgattgactcctgggagcgcactgcggtgtcaaacagtgtcgatcgggcggagagctttcgcaaaagaacggaagaacaccctgatatcaagatgaaaatagccaaatctgccctgcagtttatccatccgggcgactgcattctgctggataacagcagtacctgctggtttttggcacggcagatcccggatattgagattacggtagtcaccaactcggtcaaaatcattcaggccttggcctgtcgcgataagatccgtgtgataggcatcggtggtgaatactcaagaaggcatgatgactttcatggcccagtggccgaaagcgcgctgagaaattttcagatcaatacctttttcttctcgtgccaagggttaaatcaggaacacggtattcgcgatggcaatgaaatcaatgccagattaaaacaggtcatgttgcaggtgtcggcgaaaaagattttgctggccggttccagcaagtttgaacaatattccttttgtaaaatatgcatgttggatgaagtggatattctgatcaccaataaactcgtttcatctaaataccgcggggataatccgaggttggaaattattgaagctcataagtaagctgtttttaagaaaatgacggtcgcgaataaataactattgtacgccgcaggaaaataacactcacatccgcgtaagtttaaatatttaagtgaagataatattaatcctccctttcttaacgaagggcctgcacgtggctctggggtgggctgcccgctgacgttcaacatctttctagacaaatggcaggctctacgtgccatggatcgtaatcgggccaagcagcattcgctggccagcagtgaggagaaataatgcgtaatcatccattagggatttatgagaaagcgttgccaaagcaaaccagttggcttgagaagctggtgctggccaaagcctgtggttttgattttgtcgaaatgtcgattgatgagagtgatgaacgcctggctcgcctggactggagcgaggacgaacggatggcgatcgttcaggccatgcagcagaccggtattcgcatcccgacgctgtgtctctcggcgcaccggcgtttcccgtttggcagccgcgatagcgccacccgcgagcgggccagggctatcatggtcaaggcgataaaactggcgcaggacttgggtattcgcaccattcaactggcgggttacgatgtctattacgaaccgcaagacagcgaaacgatagcgcattttgaagcctcgctggcctgggcagtggcactggctgccggggcgcaggtgatgtgtgcggtagagataatggatacgccttttatcaacgccatcagcaagtggaaagtgctggcagacaagatcaactcaccttggtttaccgtttacccggatatcggcaacctgaccgcctggggcaatgatgtggacagtgaactgagttgcggcatcgatcagatcgcggcaattcacctgaaggatacttatccggtcactgcggatgcgccggggcagttccgcgatgtgccttttggtgacggatgcgtggactttgtcgggctgttcacaaccctgcagcggctcaactatcgtggtacctttctgatcgaaatgtggacagaaaagtcgccgcaacccatgttggatatcattcatgcgcgtcagtggatcgaagaacagatgcgccttgcgggctggcaggatgggcgttcatccatgatcattcctggggagccagtattaaactaagcgcggtggaataaccgccagagtttcctcttcctaaagcgcagccatcggctgcgctatcatttttcccgccaaataatgccaaattcaggatgtacaagcggcaaaacacccgccattatgaggtagatagcgatgatgcaggggcgagtaacgccccttgcggttatcgtgataataaaagacaggggagggccagttccgggcccgattaagcaattaagagcagacagagtcaaacaagcgaatgatcccacaaatttctcaggcatccggcctcgttcaacgggtgctggactttttggccgcgttaaaacagagcggattcaacggcgataccgccactagctatgccgatcggctgacgatggcgacggataacagcatttaccagctgttgcctgatgcggtggtgtttcctcgctcaaccgccgacgtggcgctgatcgcccggttggccgacgaagaacgcttcaaggcgctgaccttcagcccgcgcggtggcggcacaggcaccaatgggcaggcacttaataccggcattgtggttgatatgtcgcgctacatgaaccgcattctggacatcaacgtcgagcagggctgggtacgggtagaagcgggggtgattaaagatcagctcaaccagtatttaaggccattcggttatttctttgcgccggagctttctaccagcaaccgcgctactcttggcggtatgatcaataccgacgcgtctggccaaggttcgctggtgtacggcaaaacctcagaccacgtgttggggctgcgggcggtattgctggggggcgaaatgatcgacacccgcgtcatgccgacgccgctggcggaaacgattgctcaggaagatacgccagaggggcggatctaccacaccgtgctgaaccgatgccgcgagcaacgggcgttgatcctggaaaaattccccaagcttaaccgtttcctcaccggctacgatctgcgccacgtgttgagcgacgatctgcaaactttcgatctgacccgcattcttaccggtgccgaagggaccttggcctttatcaccgaagcgcggctggatatcacgccgttgccgaaggtgcggcggctggtaaacgtcaaatatgactctttcgattcagccttgcgcaatgccccctttatggtggaagccaaggcgctgtcggtggaaaccatcgattccaaggtgctgaatctggcccgcgaagatatcgtctggcactcggtcagcgaactgatcaccaacgtgccggataaagagatgctcgggttgaacatcgttgagtttgccggtgacgataaggaactgatcgacggccagatggaagcgctgtgcgaacgtctggatgacttgatctccgaacaacaggctggcgtgatcggttatcagatttgcggcgatttgagcggcattgagcgcatctacaatatgcgcaaaaaggcggttgggttgctgggtaacgccaaagggcaagccaaacccattccgtttgccgaagatacctgcgtgccgccgcagcacctggccgactacatcaccgagttccgccaactgttggatagccataatctgagctacggtatgttcggccacgttgatgctggggtactgcacgtgcgcccggcattagatatgtgcgatccccagcaagaagtgctgatgaagcagatctctgaccaggtggtggcattaaccgcgaagtacggtggcctgctgtggggggaacacggaaagggcttccgggcggagtatagcccagcgttcttcggcgaagaactttacgaagaactgcgccgcatcaaggccgcgtttgacccgctcaatcgactcaacccgggtaaaatctgcccgccgctgggtgttgatgccgtgatgatgaaagtcgatgcggtgaaacgcggtacgtttgatcgccgcattcccatcgatgtccgcacctcgttccgtggagcgatggagtgtaacggcaacggactgtgtttcaactttgatgtccacagcccgatgtgcccatcgatgaagatcaccgcgaatcggatccattcgccgaaaggccgtgcggcactggtgcgggaatggttacggttattggcagagcagggcgtggatcccgtcgcgctggaaaagcagttgccgcagcagcgcctcagcttccgcactctggttgagaaaacccgtaatagctggcatgcaggcaagggcgagtatgacttctctcatgaagtcaaagaagcgatgtctggctgcctggcctgtaaagcctgttcgacccagtgcccgatcaagatcgacgtgccgggcttccgttcgcgcttcctgcagctttatcacacccgttatctgcgcccaatgcgcgactatgtggtcgctggtgtcgagagctataccccgttgatggccaaagcgccgaaggtgttcaacttcttcttcaagcagccatgggtgcgcgaactgagccgcagcagcatcggtatggtggatttaccgctgctatccagcccaacgttacgccaacagctgtcgggccatagcgcgttcagcatgacgcttgaacagttggaagcattgagcgaaagccagcgcgaacagcatgtgctggtggtacaggatccgtttaccagctattacgatgcccaggtcgtggcagactttgtaaggctggtggaaaagctgggctacaagccggtgctgttgcctttctcaccgaacggtaaggcacagcatatcaaaggcttcctgacgcgctttgccaaaacggcgcgcaagaccgcggacttccttaaccgggtagccaaactggggatgccgatggtgggtgtcgatccggcgctggtgctgtgttatcgcgacgagtatcaagaaattctcggggccgaacgggggagtttccaggtgcaactggtccatgaatggctgcaaaagttgttggcagaacgtgcggaacagcctgccaccggggaagcgtggtatctgtttggtcactgcaccgaaaccaccgcattaccggccagtacccagcagtgggctgccatctttgcccgttttggcgccaagttggaaaacgtcagcgtcggttgctgtggcatggcgggcacttacggtcacgaagccaagaatctgcaaaattccctgggtatttatgagctatcatggcatcaggcgctacaacgtttgccaaggcaacgctgtctggcgaccggttattcttgccgcagccaggtaaaacgcattgaaggcaatggcgtgcggcatccattacaggcacttctggagatgattgcgtgaagctgtggaaacgtgaaacaacgctggaacaactcaaccaaagcggcgaaggatgcatggtggcccatgtgggtattcagttcacccgtttggaagatgactatttagaagcagtgatgcccgtcgatcaccgtacgacccagccgtttggcctgttacatggaggggcttcggtggtgctggccgagtcgatggggtccatggccggttatctgtgcaccgaaggggagcaaaaggtggtggggttggagattaacgccaaccacctgcgtgcggtatttaaagggcaggtgcgcggggtttgtcgcgcgttgcatgctggccgccgcaatcaggtctggcagatcgagatcttcgacgatcgcgatcgcctgtgctgtatctcacggctgaccacggcggtattggaatagaggccccctcaccccaaccctctctcacagggagagggagctgttggcctctgcttttttggaagtaaggaggtcatctcagcaaacgcgaacgccccctcatccaaagtgcgtcagcgaatttcagttgcactcgatcggtccctttgccctgtgggagaggggccagctttataactggaaggggacccgtttcacaaaatccttctgaaaagcggtagccttgtcccagccgccttccatcgaatatttctggcaaatcagcgttagcgtatgccgggcaaaatgatagcactgtacgcggaacagctgacaacgctgtgggttgttgatctcgacgatcagccggttatgcagtttgctcagcgcatgcaggtaactctcgtcatcgccattttccaggcataaattcgccatgccaaggctgacgccgttgtaacgcttcagatgattgatgttgcattccggccgctgtagcgccgcttccgccatatagaaatccaccgtggcatcacggatgttgaacttgtattcatcaattttgctcagcagccacgcattcatcgagatagccataggtccacgcccaattaaagcttaatgataatcattatcatatttgcagctgtggcgatgatcaatgctccccgcagttttttttctgttgtgggtgttttgaccgccacgggctaaaaatacgcgagcgactagacttaaagcagggaaaggcatttttcagacagacaaaatgcagaaataggtattttctatgaatgtttaaaacagacgacttatccggtgttataaccttatcggggctgcgggataagccgtacaagatatgattaattgctatgaattcagagggataaaaattatccccatgtctattctgcctggatgcgccatcgatttatcgtgttgccgagcgtaaatccgggcgtttggtaaatacccccgcaaaacaaacggttgaagtgataatcattatcactaacatgggcggtaagccagatcggctgtagtaaaacacgaatgtgaggtaggccatatgcatacggaagatgttggtactttttccttggcagacaacgtctggcaaggcatttcgctgagcgacagcgcggtgaagcagataatcagactcatgcagcaggatgctcaggtgaaagggctgcaactcggcgtcaaacaatcgggttgtgcgggctttgcctatgtactggatttgacccgcgaaccggccagcgacgatctgttgttcgaacgtgacggggccaagctgttcgtgccgctcaaagcgatgccgtttatcgatggcaccacggtagattttgttcgggaagggctgaatcagatgttcaaatttaataaccctaaagctcagaacgcctgcgggtgcggtgagagctttggcgtttaagcgatgcaatcaacatgacacgaagcaacgtagaagcagcgaaagatgtaccggcttgggtcagcgaaggtcgctacaaggaaggattctttacccaactggccaccgatgagttggccaaaggtatcaacgaagaggtggtacgcgccatctcggccaagcgtaacgaacccgagtggatgctggaattccgcctggaggcttaccgtgcctggctgcaaatggaagagccacactggcttaaagcccactatgacaagctgaactatcaggattacagctattattcagcgccgtcctgcggcagctgtgatgactcctgcggttctcagcctggggctgagcagcagcctggcgccagtacggaaaacggctacctgaccagcgaggttgaactggcgtttaatcagttgggtgtcccggtgcgtgaaggtagcgaagtggcggtagacgccattttcgactcggtttccgtcgcaaccacttaccgtgaaaagctggcggagagtggggtgatcttctgctcgttcggtgaggccattcacgaccatccagacttggtacgtaagtatctgggccgagtggtgccgcataacgacaacttctttgccgcactaaacgctgcggtggcttccgacggcaccttcgtctacgtgccgaagggcgtacgctgcccaatggagctttccacctatttccgtattaacgctgcgaaaaccggccagtttgaacgcaccattctgattgccgatgaaggcagctacgtcagctatatcgaaggctgctcagcgccagtacgcgacagctatcaactgcacgcggcggtggtagaagtgatcctgcataaagacgccgaagtgaagtattccacggtgcaaaactggttctccggcggcggagaaagcaagggcggcattcttaacttcgtcaccaagcgtgcgctgtgtgaaggctcagggtccaaaatgtcgtggacacagtcggaaaccggctcggccatcacctggaaatacccaagcgtgatcttgcagggcgacaactcgatcggtgagtttttctcggtggcgctgaccagcggctaccaacaggcggataccggcaccaagatgatccacattggtaaaaacaccaggtcgaccattattgccaaagggatctccgccgggcacagccaaaatacctatcgtgggctggtgaaaatcctgcctggggcggaaaacgcccgtaactttacccagtgcgattcgatgctgatcgggcccaacagcggggcgcataccttcccttatgtggaaacgcgcaataacagcgcccagcttgagcatgaggctaccacctcgaagattggtgacgaccaactgttctactgcctgcaacgaggcatcagcgaagataacgctatctcgatgatcgtcaatggtttctgtaaggacgtgttctccgagctgccgctggagtttgccgtggaggcacagaagttactggctatcagcctggaacacagcgtcggttaagcacccgtatttatagcgcagcagcgcgatcagaggacacagcatgttaagtatcaagaatttgcacgtcagcgccgaaggtaatgagatcctcaaggggctgagcctggatatcaaacccggcgaagtgcacgccattatggggcccaacggctctggcaaaagcacgctttcggccacgttggctggccgggaagagtatgaggtcaccgctggggaagtgacgtttaaaggtaaagatctgctggagctggctcctgaggatcgggccggtgagggcgtgttcctggcattccagtatccggtagagatccccggcgtcagcaaccatttcttcctgcagacctcggtgaatgcggtgcgtaattaccgtggccaagaggcgctggatcgcttcgacttcgccgactttatcgaacagaagatcgagttgctgaatatgccagcggatctgttgacccgttcggtcaacgtcggtttttccggcggcgagaagaagcgcaacgacatcctgcaaatggccgcgctggagccggagctgtgcattctggatgaaacggactccgggttggatatcgatgccctgaagatcgtcgccaacggcgtcaattcgctgcgtgacggcaagcgcgcctttattattgtcacccactatcagcgtattctcgattacatcaaaccggattacgttcacgtgctttcccaggggcgcatagtgaaatccggtgatttctcattggtgaaacagttggaggagcagggctatggctggctttccgaccaacagtagttcacaggcactacagcagatgtacagcctgttcgaagctcgcggcggcgagcgttctgcgcatgcgttagcgcattggcagcaggctttgcgccaaggctggccgactcgcaagcaggaaaactggaaatatactccgttagaaggcttgctggagcagcagtttctggagccagtggacaacgtgctcagtgcggagcagcgtgacaagttggcgttgaagatcgatgcgtatcgcctggtgtttgtcgatgggcgcttatgttcacaactgagcgatgaggatcttggcgactaccgcttgaccagggtggcctatgatgcgccactcacgctgccggatccgatccagcctgaaattttcctgcatttgacagaaagcctggcacaggaaaccagcgtgattagcctggcggctggcacagatccggttaaacccctttatctgttgcatatcagcaccggtcgcgagcagcccggtgaagtgaatacgttgcatcaccggcatcatctggagattgctagtggcgcacgagcttcggtcatcgaacactacaccagcgttagcgctgcggcccactttaccggtgcgcgcctgaccgtgacggtgggtgataatgccgagctgcatcattgcaaactggcgtttgagagccaggccagttatcactttgcccataacgacctgctggttggccgcgatgcgcgggttaaaagcgacagcttcctgctcggggcggggctgacacgccaccacaccagtgcgcagttaaacggtgaggggagcaatctggtcatcaatagcctggtgctgccggtaggtaaagaggtatgcgatacccgtacctatctggaacacaacaaaggctactgcgaaagccgccaactgcacaaaacggtggtcagcgatcgagccaaagcggtgtttaacggcatgatcaaggtcgcgcaacacgcgatcaaaaccgacggacaaatgaacaaccacaacctgttgttgggcaaggtggcggaggtagataccaaaccgcagttggaaatctacgccgatgatgtcaaatgtagccacggtgccaccgtgggccggatcgatgaagagcaactgttctatctgcaatcgcgcggtattgataagcacgcggcgcagcagatgatcatctttgcctttgccgctgaactgacggagggcattgccgacccggtcatacgggagttggtgctggctcgtatcgccgatcgtttaccccaggaggcggcatgagttatcccctggaacggatacgtagtgattttcccctgctggctcgggaggtaaatgggcaaccgttggcttatctggacagtgctgcgagcgcgcagaaaccgcagagcgtgattgaccgcgaactggatttctaccgtcacggttatgccgcggttcaccgcggcattcatacgctgagcgccgaagctacccagcagatggagggcgtgcgtgagcaagtggcgcgctttatcaacgcgggttctgcagaagaaatcgtgttcgtcaaaggtaccaccgaaggcattaatctggtagctaacagctttggccgccattcgctgacggcgggcgatagcatcatcatcaccgagatggagcaccacgccaacattgtgccgtggcaaatgctggcacaggagcgaggcatcacgctgcgtgtttggccattgcagccagacggcaccttggatttggcacaactgccaggcctgatcgacgcctccaccaagctgttggcgatcacccaggtatcgaacgtgctcggaaccgtcaacccactgcatgagatcgttcccgtggccaaagcggctgggctgaaggtgctggtggatggcgctcaggcggtgatgcaccagcgtatcgatgtccaggtgcttgactgcgatttctatgtgttctccggccacaagctatacgggccaagcggtatcggtattctgtatggcaagcaagcgttattggaacagatgccaccgtgggaaggcggcggtgcaatgatccaacgggtcagcttgtcggagggcacgacctttgcaacgcctccctggcgttttgaggctggttcgcccaatactgcgggcatgatggggctaggggcggccatcgactacgtcgaggctctggggctggaaaacatccacgattacgagcagtctttaatgcgctacgcattggatggattgcagcaagtgccaacgctgaagatctatggccccgcacagcgtgccggagtgattgcctttaacctgggtgaacatcatgcctacgacgtgggcagtttcctggatcaatatggcattgcgatccgcactgggcaccactgcgccatgccgctgatggagttctaccgggtgccaagtatgtgccgtgcctcgctggcgttgtacaatacccgccaggaagtggatcgcctggttgccggtttgcagcgcatccatagcttgttaggctaatcattaaagggagcaatatggcgcatttgccggacaaagataaattagtgcgtaatttttcccgctgcctgaactgggaagagaagtacctgtacgtaatcgagctgggaagccagttgccagcgctggatgaacgcgagcggcaggcggccaacctgatttctggctgtcaaagccaggtctggatcgtgatgagcaacaatgcgcaagggcgtgttgagtttcatggtgatagcgatgccgccatcgtcaaggggttgctggcggtggtgtttattgtttatcaccagcttacgccgcagcaaattctcgatctggatgtacgtccattcttcggcgaactggccttgagccaacatctgacgccttcccgttctcaaggtttggaagcgatgatccgcgctattcgcagtaaagcggcccagctcgcctgaccgggcacccaaggcttattgatgacaggttatgtcaatgagcctttacaattcctgccaagctccgcctgttttccgcaaatcatagctatttcagtcagttactcgttgacgatgcattgacaattcctgtgtttgattacgttataacatgttgattttttacaatttattgcctttgactcggttcttgctaatatcgaacgagcatttatcttatttacctgctggccagcgaccgctagccttgcaatgaaccgtaaaatcaatagggataagaatgaaacgtgcgttgactctaatgggcgtgttattcgccaccgtactgaccggcacccaggtcgccagtgcgaacgaatacccattgccgccgccaggcagccgtctgattggtgagaatacgatttacaacgtgccaaacgatggccgttcgctggaagccattgcggctgactacaagattgggctgttgggcatgctggaagctaacccggggaccgatccctatctgcctaaaccggggtcggcgctgacgatcccgacacagatgctgctgccggataccccacgtgaaggaattgtggtcaatctggcagaactgcgcttgtactattacccgaaaggggaagataaggtgattgtctatccgatcggtattggccagaccggtatgaatacaccgttgaaggtgacctcggtcagccagaagatcccgaatccaacctggacacccaccgccaacatccgcaagcgctaccagtcacagggtgtgactctgcctgcggtaataccggctgggccagagaatccgatggggctgtttgccatgcgtctggccatggggcacggtgaatacctgatccacggcaccaatgccaactttggtatcgggatgcgcgtgagctcgggctgtatccgcctgcgcccggacgatatcgaagcgttgttcaaccaggtgccacaaggcaccagagtgcaaatcgtcaatgaaccggtgaaggtctccgtggagccagacggcaaacgctatgtagaagtacatcagccattgtctagagtggccagtgacgatccccagaccatgcctatcacgctttctaaaaatcagaaagcctttgctgccgatccacaaaccgataaggcaatgctcgacagcgccatcgtacggcgttcaggtatgccggtgctggtcagtgtagggcaagagccttctgaggtcgctacgccgcctacagcgcttcctggtgagggagctgacccctctggcgagtctggtgcaccgattagctcggtgaactgagttcctgcattgtgtaagggcgtggtataccccttgtgtcaccaatctgaagcctggcgttgagccgggcttttttttgcctgcaagggggcaaatgagaggcaaaaaaaacggtgcacaatgtgcaccgttttcaataaccgaagctaacttactttttgtaagcgtgtgcttggttgtccagacgctggttagcgcgcgctgcgtcgtctttagctgcttgaacgtcagaacggattgcgttcacgtcgttgctcagctgatcaactttagcgttcagagtctgaacgtcagaagacagttgatcgattttagcgttgcttgagcagccagccagcatagtagaagccaggattaccgcgcccagtaccagtttagtacgattcattataacaccctctagattgagttaatctccatgtagcgttacaagtattacacaaacttttttcgaaagagaataaattttttgtattaaggccctttattttgatcgttcgctcaaacttgcatcttgttttgcaaaatagttaaaaaatcgaaggaaaacagcctgattctatgggacaactctcaaatgaaattggcgaaataaaccgctttaatggttgcgtttttctgaaagtgcggtattgcagataaaaaaaacgccgcttagcggcgtttgggtcacagatttgttgtcacgtttattattacagcacgtgaaccgaggcagtattggtggtgccgcttggtaccagagcaccagaaaccatcaccacgacgtcgcctttctgtgccaggccgctcgccaaagcaacttctttaccaatgcggtagaagtcgtcggtagaagcgatttctttgaccatctgagtggtgatacctttgctcaggatcaactgacgagcagtgacttcgttagtcgtcagcgccaggatcacggcgttagggaagtacttacgcacggatttggccgacttgccgccgctggtagccaccacgatcagtggtgcgtccagtttttcggcagtttctaccgcaccgcggcacaccgcttcagtaatacgcagtttacggttgtcgttcagggtgtcgatacggctaggcatcacgcggtcggtacgttcgcagatggttgccatgatggtgacggcttccagcgggtatttacccttggcgctttcaccagacagcatcaccgcatcggtaccgtccaggatggcgttggcaacgtcaccagcttctgcacgggtagggcgcgggttcttgatcatagaatccagcatctgggtagcggtgataaccactttgcgtgcgcggttacacttctcgatcatcatcttctgcgcgaagatcacttcttctaccgggatttcaacacccagatcgccacgggcaaccatgatgccgtcagatgcttcgaggatctcgtcgaagttgttcaggccttcctggttttcgatcttggagatgatctgaatgttttcgccgccatgagccttcaggtgctcacggatttccagcacgtcggaacgcttacggataaaggaagccgcaacgaagtctacgccttgctcacaaccgaagatcaggtcacgtttgtctttttcggccagcgctggcagctgaatggaaacacctggcaggttaacgcctttgttttcgcccagatcgccgctgttcagtaccttacagatcacttcgctttcggtaaccgcagtcacttccataccgatcaggccatcatccaccagtacggtgttaccaattttcaggtcggcagcaaagccagggtaggtcaccgcaacgcgctctttgttaccgataacgctctggtcggtggtgaaggtgaaggtctggcctgcaaccagggctgcatcaacgccgccttccagcttcatggtacggatttccgggcctttggtatcgagcaggataccggcgtttataccggttttggcaatgaccgcacgcatgttcttgatgcggttaccgtgttcttcataatcgccgtgggagaagttaaggcgcattacgttcatgcccgcgttcagcaggctggtcagcatttcttccgactcggttttcgggccgatagtacaaacaattttggtctttttcatgacgattttttctgcaagttgtgatggataataaaactaacggtaccggcggctaggccatcggtaagggatttgggttgtgcctggcaatgcaaaacatagttaaggataggtgaccttggtcgaaatggggtggaaaaattcggccgatgcccaggtgtgggtaggctgcgcaaaaagcgaggatgagaatttgttgtaattgcgttttcgcagatcaagggctgaaaccattcaactgaaagacgttgcgcattataaggctatgcggctggaaacaaaacaaaaaaccgcagttgcgggcagttttgtacataaagtcagcaaatgtggcgcaaataagccgcctgccagcgggtttgttgcgcaaatagcattactgtaacggattatgttttcgaaaaataaagtgacgaacttcacattttcaaacgttttgctggatttccagcaggactccgtcatccagacagaaacagccaaatacggtagcggcagggatcgccaacgtttcctgggctatcagagtatgcacatcgctgccgacggtgaactcgaagatcccagaaaggatgcggatttgctggggataggggcgtttttgcagttggtcgaaggtgcctgcggcaaatttgacttcccaggcggtgctcccatcgctcattagcccttggcggcgggcgaggccattgtcgagttgttcgaacggcagctgtgatttaaaaaccgacatcaaaattacctccatcaggatactgcgctgatgatacgcgacgggccgacgctctgtccggtattactgttaaattgggttaccgttaggcgagagataatactgggaagcgaaacaagaagtggtgcgtccgaatggactcgaaccatcgacccnnnnnnnnnnnnnnnnnnnnnnnnggacgcactgggctactttcaggaatttggtgcgtctgaatggactcgaaccatcgacccccaccatgtcaaggtggtgctctaaccaactgagctacggacgcactgggctactttcaggaatttggtgcgtctgaatggactcgaaccatcgacccccaccatgtcaaggtggtgctctaaccaactgagctacagacgcatctttttcctctctgtcatggctgacagcggggacgaatattaacgagcaacccggccgctggcaaggggaaaaacgcaattttatttggtatttcacgcgattgctgagcttatgtgcagtaaggtggttttttctgcaatggctggcgaggaactcgccggtttgcctgagacaaaccggcgaacgctattaacgagtggaacgctgcaaaatcaacgccggaggctggcgctgtaaccaacgcatccgcaataccatcatgatggcggcaaaggtcagaccgataataaagccgaaccagaatccgcttggccccattgccggcacgatgtagtccgtcagcgccagcaggtagccgcttggcaatccgagaacccaataggccacaaaggtgatgtagaagatcgccctggtatctttatagccccgcagaataccgctaccgataacctggatggagtcggatatctggtaaatcgccgccagcagcatcagatgggaggccatggtcacgaccgcagggttatcgttatacagcagggcgatagactcgcggaacgcggcggtgaacaacgccgagcagctggccatggcgatgccgacggcaatcgccgcataggcggcaatccgagcgccctctaccgatccttcgcccagacggtgtcccacgcgaatggtggccccaacgccgagcgatagcggcagtacaaacatcagtgaactgaagttcagggcaatctggtgcccggcaaccgcgacgatacccagcggtgaaaccagtaatgccaccacggcaaacagcgtcacttcaaagaacaaggccagggcaaccggtaggccaatgccgatcaggcgttttaacgcctgccagtccggaccacgatgtgcaccttcctccagcttgatatcccgcagcgaggacgcacgtttggcataccagcgcatcatcaggaacatcatccaatacacgctggcggtagcgacaccacaaccaacgccgcccatctccggcatgccaaacttgccgaaaatcaatatgtagttgatcgggatgttgatcaacagacccaaaaagccgattaccatgccgggcttggttttggataagccttcacattggccacggacgacctggaagaacaaatagccgggtgctccccacataatggcatggaggaaaccaacggctttttcagccagcagcggatcgatgttgtgcatcatgtcgatcaccaactggctgttataaatcacggcgataatcagtagtgaaaccccagatgccagccaaaagccctggcgcacctgatacgcgatacgatcgcggcggcccgcgccgttgagctgggcgattaccggggtcaaggccagcagtaaaccgtggccgaacaggatggtcggcagccagatagaggtcccgacggcaacggcggccatatccgtggcgctataagagccagccatgatggtatcgaccacgcccattgcggtttgggatatttgcgcgatgatgaccggaattgcgagggccaataaactacgcgcctcaataaagtacttctgcacgtatacacctttctaattatttatggggaaggggtgttgctgcatcagcaacaactaaaaactgcggaatatgccgaaaagattgtacctgctagtcggggttaagcaaaggttgtaaagaaatagttatactcgtcgtcttgtaactaaagtgctgttagccccagagcataaactaggcaggcaccgcttttttgccgttgtgcgtttggttttctgccgtaactggggcaaactgcttacagcgcgttgaacatagtcataaagaagaggccaacatgtttaccggtatcgtacaaggcaccgccccgctggttgccgttgatgaaaaacccaacttccgtacccacgttgttgaaatgcctgatgagttgttaccagggctggagttgggggcctcggtagcccacaacggctgctgcctgaccgtcacggagattgcaggcaatcgcgtcagctttgacctgatcaaagagaccctgcggttgaccaatcttggcgatcttaaactgggtgatgtagtcaatctggaaagagcagccaagtttaacgatgaaatcggcgggcacctgatgtccgggcatattatctgtactgcggaagtcaccaagatctatacctcggaaaataatcgccagatctggctgcgtatgccgaatatcgatttgatgaaatatgtgctgcataagggttttatcggcatcgacggcattagcctgaccataggtgaggtggtcaataaccgtttctgtgtgcatttgatcccggaaacccttgagcgcaccacgctaggtaaaaagcgcctgggcgataaggtcaatatagaaatcgatccgcaaactcaggcggtggtggataccgtcgagcgcgtgttggctaatcgtgaggctgcgttagctgttaccaagccgccagtacccaaagcctgagaaccctgtaccgataaccctatataggagccaaacgtgaagttttatagaaaaacgatgatgttagcggcgctgttggcgctgaccgcctgttcaagctccccggaacaggcgaactcacagtctgccgaggctgaagacgatacctgtggtgcggcgcagtatcagaattatgtgggtaaaccgctgtctgcgttggatggggtcaatattcctcagcaggtacggactattccttataactctatggtaaccatggacttcaatctaaagcgcttgaacttcctgggtgacagtgaagacaaaatcattcgcgtttattgcggttgattatcctttaccccaaccctgtgggttggggtaaaggattttagcggggaactcgcaggccaccttcgacgcctttagggctgaataccacctgccaaagttgaatatcgcgagcgcggaacgccccggcacaggcattaaggtaataactgaacatcctttcgaaacgttcggaatagcgcgatgccagctgtggccagctctgtttgaagcgttcataccaggccatcagagtacgatcgtaatctgcgccgatattatgccaatcttccatgacgaaacggccttcgctggcctgggcaatatgcttcactgacggcaggcaaccgttggggaagatatatttattgatccacggatcaacgttcatatcggtttcgttggagccaatggtatgcaacaggaaaatgccatcgggttttaaattacgttccaccacctcgaaataggtgcggtagttcttcggcccaacgtgttcgaacatgccaaccgagacgatgcggtcaaactgttggtagagatcgcggtaatcctgcagcagaatttctacgtccagcccggcacagcgttcttgcgccattttctgctgttcggcggagatggtgacccccaccatggaaacgccgtagtgcctggccgcataagcagacaggccgccccagccacaaccgatgtccaatacccgcatgccgggctgcaggtgcagtttttcgcaaatcaaccgaagtttggcttcttgtgcttcttccaacgtagtggcctgttgccaatagccacaggaatattgcatgtagggatccagcatctgggtaaacaaatcgttacccagatcgtaatgctctttaccaacgatccaggcacgtttttgggattgcaaattggtcaggcgagcggcggcaatacgcaagatatccttcaggtggtggggcagtttcttttccaggccagctgcgacaacccgctgaaaaaatatgtccagccgttcgcactcccaccaaccgtccatatagctttcacccagccccagggagccgtcttgcagtacgcgtttaaagaaattgggattattgatctgaatatcgaaagggcgtgaaccattgatttcaataccggccatgctaagcatttcatgagcgatacgataccaatggttatcctggatgctcagatcttctatacacgatgaactcatagcttctccatcaccttcttctgacttatgatcctgcagaatttagcgtagacattttctacaggggcatacgtatacctacggtaaaatttcaccgtggtgtctgatatccgactggaacagaggaaatttaagagactccctgcgtcaaagaacgcgggtaaatgctaccttaaataaagtgtgatgccatccacgtacgcagcagttgctgcaataagagcttagtataactgttattctaaaaggtcgttttgagtataggcttgccgaggcgtagactcaactgcaaatcgcgctcggcaagaattttcattaagtgactatttacaaggagaattatgagacggagtcggcatgctcctgccgtgttacctgcgtatcatccgttcctttcccacgttggatcagatagcccaaggctgctaaaaatacggtagcaaccattacgctagccgtggctaacagcggttgggcgataaatgccgaaaccaacaggctggcgataaagcataaccccaactgcaacgtattttgcagcgcagcggctttgccactgttgttggggaagggcatcaatgcattggccactagaataggatagctggcaccgtttactaacgccataaagcagaacggtatcaacagcgtggtcaacgttggttcgctcaacgtggcaatcagatacaacgccaccatgctaacgccataagctaacagcagccacggcagcaaggttttgccagaaatgcgatttaacgcgctacggcagctgtaaccccctaataagaaagccagtgtttgcggcacatagctcaaaccaatatcgtttgggctataccccatatcgccgaggataaagggtgaacccgtcagccaggcgaagaagccggcagaacaggcggcaaaaaccatcacgttgccgctgaataccggggatttcaaaatctgcataaagccaagtcttggcttcttatcggcggaaggtaccagtctgctgcggtctttcagcaataaagtggggatcagcagcagggcagtaatccccagcagcacggcgaagatggcccgccagcccatatggttgagcaaccaggcacccagcagcggggccaacgctggagagagggcgaccagtggcataatggaagcgaaaacgcggttggctttgccatcgcggtagcgatcgaccacgatcgcctgccaggtgacggcggcggaacacacgccaatggcttgaataaagcgcagtgaccacagttgtgccacgttctcgacccacagcataccgagacagccgaaggcgaacagcgcaaggccaatcaataacacgggcttacggccaatacggtctgacagcggcccccacagcaactgggcgaaggcaaagcccgccaggaagatgctcaggctggcgctgatcgccccagcggagatttgcagatcctgctgcattgccccaaaggcgggcaggtacatatcggtagccagatagcccaacatactcaggccagccaggtagaacataaatccaaaatttcgcattgctatttctcgttaaaattatgttgtcgcaggttttgaagcgccggcaagtgtatacggctggatctctgcttgtgaaacggtaatatttgcaaggtgctgttaaaaaatttgaaggcaagcttatgtggtctgaatattcactcgatgtggtagatgcggtagcacggaccggcagtttcagcgcggcggcacaggagctgcaccgtgttccttctgcggtgagctatacggtgcgccaattggagcaatggctggcggtgccactgtttgaacgccgtcaccgggatgtggaactgacgcctgcgggggcgctgtttattaaagaagcgcgggttgttatcaaaaaaatgcttgatacccgacgacagtgtcagcaggtggccaacggttggcgcgggcaattgcggattgcggtcgatctgatcgtcaaaccccagcgcagccgccaattggtgctggatttttatcgccatttccccgatgtggaactgatggtgcagcctgaagtatttaacggcgtatgggatgcgctggtcgatggccgcgcggagatggccatcggcgcaacgcgggcggtgccagtgggcggtggttttgcctttcgcgatatgggctttatgaattggctctgcgtagtccatgccaagcatccgctggctgccatgcaaggaaaactgcgcgacgatcagctacggccttatccctcgttgctgttggaggatacttcgcgcaatttacccaagcgggtgacctggtcgctggacaaccagcggcggctgaccgtgccggactgggtttcggcggtagattgtttgcgtgccgggctgtgtgtgggcatggtgcccgcgcatcgggtattgccgttggtacaaagtggcgaactggtggtgttgccactgcatgagcctttcccacccagcgcctgctgcctgacctggcagcaaaacgcccagtcgccggccatggcctggctgttggattatctgggcgatagcgaaacgctcaatcaggaatggctcagtgaagaggatccgggggcagttcacatgcgccccaacatgagttaacggcggtaatcgacaaaaggaccatcggcaactgagcggcgctcgataagttttggatgtacttcaatcacctgcgactcttcacgcttgctgatgatgcgatccaacagcatggtaaaggccatctcacccaggcgctctttcggctggtgaatggtggtcagcgctggggtgaagtagcgggcattacgcacgttgtcgtagccaatgactgagatatcctgtggtacacgcaannnnnnnnnnnnnnnnnnnnnnnnnnnnnnnnnnnnnnnnnnnnnnnnnnnnnnnnnnnnnnnnnnnnnnnnnnnnnnnnnnnnnnnnnnccccagctcatcggcggcgcagatcgcccccatggccataatatcaccgccacagaaaacagcggtggggcgatgcttttgcgacaggatctgatgcatggctttgtagccagattcgggctcgaaatccccctgcacgacccattcttcgcgcacttcgatgttggcttccttcatggccttcagaaagccctgatggcgacccccaccagtattacgtgccagttgacccggaatggcaccgatgtcccggtggccacgctcgatcaggtagcggcctgccaggtagccgccctcgaaggcattgtcgataatggtatcggtgaagtctccgcgcgcggtaccccaatccatcaccaccatgggaatattacggtaatcttccagcatgcccagtagctgatctggatattctgagcacatcaccagcaggccatcgacacgtttttgcgccaacatcgccagataggcttgctgtttatccagattattgtgcgagttacacaagatcagggtatagcctttgctgtagcagctgttttctaccgcttcgatcacttcggcaaaatagggggcctcgctcgaggtggcgagcaaaccgatcgatttagtatggttgaccttgaggctgcgggccacggcgctgggtgaatagtgcagctctttgatagcggcccaaacggccgttttggtatcttcggcgacgaaacgcgttttattgataacgtgcgaaacggtagtggtagaaacgccagcgcgtttggccacatctttaatcgttgccatgtaaaaaatgactcctaaacccacatgttacagcatgtaagtatgatgttaatcgtttgcctgcgtagatccttccccagataagcgaaaactgagtttttagtgctgaagtcgtaaatcgcttgaacagggaggggcagtttatcggtacgcagttgtgaactgcggattttgtcgcaaattgaagaaaagtggaagagctaatcggtaattatcagtggggaaatcaaaacaagattttaatcacggactgtgggaaaatgatttgacgtataaactgtgtggcttatgctctggaaaagccaatctgagagggagttgtatatggataccaatttgaagatgtcattactcaccaccgtgggtgctttggcaatgattattgctttcagttttattgccgcattgaactgagccgcagcagaaaaacaaaggcgcagcttgatgctgcgccttattattgtgcacagaaaacctccagct

SEQ ID NO: 369 - DNA, 25326 bp, unknown
  Altogen  635822 strain
  misc_feature (14138)..(14149): n is a, c, g, or t
tcgatggaggcgcattatagggatcccatttttttccacaacccctttttagatcttttcttaccgactgcgcacttttccgccctttcgcgcggatcttgcccgatcaaggccattttaccgacgatcccccgtgttgactggttgtaattccaccgtcaaagtctagtattgccggtaataagatccttatacgaggcaatcccatgtccaattcagtgcgtccttatcttcattactcccctcaaattggccaacgcgtcatgatcgatccttccagcgtagtgatcggcaacgttgatctggctgatgacgtcagcgtttggcccttggttgccatccgcggcgatgtcaacgcggtaaagatcggcgcacgcagtaatatccaggatggcagcattctgcatgtcacccatcaatccgattataatccggcgggttaccctttactgatcggcgaggatgtcaccgttgggcataaagccatgctgcatggctgtaccatcggtaatcgcgttttggtgggaatgggctccattctgctcgacggtgccgtaatagaagatgatgtgatgattggtgcaggtagcctggtagcccccggcaagcatctggaaagtggctacttatatgtaggcagccctgcgcgccgggttagagccttgactccggcagaactggaagggttacgctattcggccaataactatgtacgttggaaagacgaatacctcagtgaagatatctgactgccccgccctgcttgccagagcggggcaaccatcacactgccatttcctgacgtaattgctgcaataccggttcaatctccggcatcacaccatgccataaaaagaaagcatgggcagcctgccccaccagcatgcctaaaccgtccgcataatgttgcgcccccaactgctgcgcccaagccaggaatggggtgccgccctgttggtagaacatgtcatagcaccgtgtcgtgctgtggataatgctgtcaggcagtgcggggatctcccccttgaatcctgatgctgtcgcgttgatcactaaatcaaaatgctgttgatccagccgatccagcggcaaggcggcgatctcccccagatggcggaacgccgcagccaactcctcagcgcggctgaaggtgcggttagtcaacaccacttcacagccaaaagagagcagcggcaggatcacaccacgcgctgccccacccgccccaaccagcaacacgcggtcatctggccgaatcaactgctggcgttcaagatcagacagcaaaccgataccgtcagtgttatcccccagcagctttccatcgggcaaaacctttagcgtattcaccgcaccggccattgccgccctttcgctaagttcgcttgctgcctcataggcacattctttaaaagggacggtgacgttggccccttggccaccagcagcaataaaccgttgcaaggtaggtacaaaaccgtccaacggagccagcacggtgccgtaggggtgttcgatcccggtctgttgcgcaaacagcgcgtggatacggggggacttgctgtgagcaatcgggttaccgaataccgcgaacttctccatagatctagcctctagccctgacggatcagctcaccggtcaaagcatctctgatttcagaagggtttaaccggccacccacgttacctaccagcaccgggaaagcatcaccaaactgctgctgcacttcagccacggtgcggcacggctcctcaccgcttaagttggcactggttgacaccagcggcttgccgaactggcggcacagctgttgcaccagaggatgatcgctgacgcgcacggccaacgaattaaaacgaccggtcagcaaggctggcgtttgcggttttgccgggatcacccaggttaccgggccaggccaactggcaaagatcgcggcacgctgctgctcattcaatacgccatcatcaatataaggtgctagctgggcataatcggcagcgatcaggatcaggcctttttcccacgggcgttgtttcaaggccaacagctgtttgacggcctgttcgctatcagggtcacaccccagaccgaataccgcttctgttggataggcaatcacctgctggttttccagcgcggcaataatgggcgcgaatgaggaagtttgttctgggttcatagcttgattattctgagatagcgacgggttttccgcacagtttactggcgcagcaaagcgttgggccttttgccgtgcgcttttccatcagtaatggatagtggcagtaagcacactcaccggcgacgggtttaaaattaagcacaaactgacattctggataacgatcgcaagaatggaacaccttgccaaagcgagatttgcgctgcagcagttggccttggccacactgagggcaggcgatgctggtttcatccggtttgtcgatcacttcggtatgatcgcagtcgggatagtggctgcaaccgataaacatgccataacgcccctggcgtaacaccagcgttgcctggcatttcgggcattgctggccctcaagcactttgacaatatggccatccgcctgcgctttcaaaggccggatatattcgcactgcggatattgagaacagccgagaaaggggccgtggcgaccactgcggatcaccaactcggccccgcattccggacagggttcattttgcctcgcggcaaaaatcgctggttttgtcataacgtcttctatgcctgttacctactcagtgcaggtaaccttcgtttacttcaaataacagttcttccatctgctgataggcgctctcatatccggggatattgaacaacaccatcagcactacccatttcagatcttcgagatcaaattccgtattatccaaagccataacacgatcgataaccatttcacgggtttcgaggttcaatacctggatctgttctaggaacaggagaaaaccacggcaaccggcatctaaacgcacgctctcttcttcggtgtagatccgcatagccagcggatcggcatccataaaataaggggcattctcgccttcctggaggtctgcaagcttttcgagccaattcaacgcgttgaagatatcatcacgatcaaatcctgcttcggtaagatcgtcggtcaaggtatcctgatcaacgtgcatctctggctcattgtggatataggtttcaaacaaatacatgagtacgtcgaacatggcatgccctccttattcggacatagccgccgggtacagctgcgatccaacctgctaactccagatcgagtaatttgattaccacctctggcacaggttggccggcacgttcagcgacgacgtcaacaggtgtcacctcatctcctacgttagccaacacatcggcaaatggcaattcaacttcggcctctgatgcagaaatagttgtattttcgttcacggacagccattgcaacccacttcccagctgttctgcgatatcttttgggccggtgaccaggctggccccctgctggatcaaccaatgagatccctcgctcatcgggttacccaatgcccccggcagggcaaacacttcgcgcccctgttccaacgcgtaacgcgcagtgatcagcgacccgctacgcagtgaagcctctatgaccaccacgcccgcacttaacccactgataatacggttgcgacgtggaaaatgagccgccagcggcaaatcggtagccagatgttcggaaatcaccgctccgccctgctcaatgatttgctcggccagccggcgatggcggcgtgggtagatatttgccaggccgctgcccaataccgcaatggtgaccccttcggcctccaaggttgcacggtgacagatcccgtcaatgccaatcgccaagccgctggtgatggcgaaaccgcaatgcaccaacccgctggcaaagtaactgccccaccgctcgccatagtggctgaactggcggctacccaccatggcgatttgcggctgttgcaaagcctttaaagccccctgcaccatcagtaataacggcgcgtcatcgatatgtgccaagagttcgggaaacgctggctcaccgtaccgcaccatctgattacccagctgctccagccacttgagcgttgccttgagatactgcccatgcccacgccgaaactgcttttgctgctggtcattcagccccagaggcttaagcaaccgataaggatcgccgccttcggcaatcaggcgatcgataatctggctggcttgcagtgcgtcgatctttgtcaccgcatgcatacgtagagcgatttcttctggccccatggagcattccctcgctgtaattaggggattaccaattcgtgcaattggtctgggatgctgtcaatcaggccaagaaatgtctagaatagaagctaatcactgttcatcactcggatacagatcttaagatatatgtcagtcttgcaggtattacatttcccagacgagcggctacgcaaaattgcggccccggtaaaagaagtcaatgcagatgtccagcgcatcgtggatgatatgtttgaaaccatgtacgcagaggaaggtattggcctggctgcgacacaggtcgatattcatcagcgcattatcgtcatcgacgtttctgaaaaccgcgatcaacgcctggtgttgatcaacccggaactgctggaaaaaagcggtgaaaccggtatcgaagaaggctgcctttctatccctgagcaacgcgccctggtgccacgcgcagagaaagtgaagatccgtgccctcaatcgtgaaggacaaccttttgagcttgaggccgatgacctgctggcaatctgtatccagcacgaaatggatcatctggttggcaaactgtttgtcgattacctgtcgccgttgaaacgccaacgtatccgtcagaaactggaaaaaatggccaagcttgaagctcgcgcctaaccgatcaggaaatcaacgtgtctgactctttacggattatttttgccggaaccccagactttgcagcgcgtcacctagacgcgctgttgtcatctgggcatcaggtggtcggcgtcttcacccagcccgatcgccccgcaggccgtggcaacaagctgacgccaagcccggtcaaggtgctggccgaacagcatcaaattcccgttttccagcctaagtcactgcgtccgcaggagaatcagcacctggttgccgatctgaatgcggacgtgatggtggtagtagcctatggcctgatcctgccgaaagccgtgttggatatgccacgcctgggctgcatcaacgttcatggctctctgctgccacgctggcgcggtgcggcaccgatccaacgcgctttgtgggctggcgatagcgaaactggcgtaaccatcatgcaaatggacgtgggtctcgataccggcgacatgatgcataaaattgcttgcccgatcgaagccacagataccagtgccagcctgtacaacaagctggcagaactggggccacaagggctgctgatcactttgcagcaattggcggcgggtacggtgcagcgcgaagttcaagacgaagcgctggtgacctacgcagaaaagctgagcaaagaagaagcacgcctggactggagcctttccgccgaacagttggaacgctgtattcgcgcttttaacccttggccaatcagctatttcaccatcgacgatcaaccggtgaaagtctggcaggcaaccgtgctggcggaaaccgccaacgcagaaccgggtactatcgtgcatgccgacaagcacggcattcaggtggctaccgcgcaaggtattctcaacctcacgcagctccagcctgccggtaaaaaaccgatgtcggcacaagatttactgaattctcgccgcgaatggttcacgccgggcaaccggttataagccactcccattgcccggccattgttgccgggctgttcgtttcttaatgccgatcgtaatccgccttagcctatgaaaaacaattacaatctccgaagcattgcagccaaggccatcggccaggtactggatcaagggcagtcgctcagtaccattttgcccgcattacaaaagaatatttctgacaaagaccgtgggctattgcaggaactctgttttggtacgctgcgggttctgccgcagctcgaatggtgcatccagcagttgatggcaaagcccatgaccggcaaacagcgccctttgcactatttgctgatggttggcctgtatcagctactgtatacccgtataccaccacacgcggtattagccgaaacggttgaaggcgcggtcgccttgaagcgtccacagctgaagggattgattaacggggtactgcgccagttccaacgccagcaagaagagctgctggcacgtgctgccaataacgaaagccgctatctgcatccaagctggttgcttaaacgcatcaaactggcttatccggcacagtgggagcagatcgttgatgccaataatcagaagccgccaatgtggctgcgcgtcaatcgtcttcaccatacccgtgaagattatctgcagcttatgcagcagacaggtattaccgccgagcctcatgcggagtatcgcgacgcagttcgcttactggctccgtgcccagtaacagatttgcccggtttctccgagggctgggtaacggtacaagacgcctccgctcaaggttgcgttgatctgttggatccgcaagacggtgagcagatcctcgatctttgtgcagcccccggcggcaaaacgacccatattctggaggccgctcccaaagctcacgtgctcgccgtggatatcgacgaacagcgtttaagccgggtgaaagaaaacctgcagcgcctgcgccaacatgcagaagttcgccagggtgatggccgtaccccgcaagagtggtgcggtgaccaacagttcgaccgtatcctgttggatgccccttgctccgccaccggtgttattcgccgccacccggatatcaaatggctacgtcgtgacagcgatatcaccgaactggccgctttacagagtgaaattctggaagctatctggccacgcctgaaatccggtggcgtaatggtttatgcgacctgctctattctgccgcaggaaaatagcgaacagatagccgcgttcctgcaacgtcacggcgatgccaagctggttgaaaccggcgacacgcaatcaccaggtaaacagaatctgcctcatcctgaggatggcgatggtttcttttacgctaagctgattaaaatataactgttcagggagcgcctgcgggcgttctcacctttcggccacggccgtcgcagatcgagcagagaaatcgatgaaaataattattcttggcgcagggcaagttggcggaacactggctgaaaacctggtgggtgaaaataacgatatcaccgtggttgataccgacaccgggcgcctacgccagttgcaagacaagtttgacctgcgcgtcgtccaggggcacggctcccatccacgcgtattacgtgaagccggtgccgaagatgccgatatgctggttgccgtcactaactctgacgaaaccaatatggtcgcctgtcagatcgcttatacgctgtttaacaccccgaatcgtattgcacggatccgggcgccagattatatccgtgagtccgagaagctattccatccggaggcggtacccatcgaccacctgatctcgccggagcagttggttatcgattacatctacaagctgatcgaataccctggcgccttgcaggtggtgaactttgccgacggcaaggtcagcatcgccgcggtgaaggcctattatggcggcccactggtgggaaatgctctgtctgccatgcgtgagcatatgccacatatcgatactcgcgtggcggcaattttccgtcatgaccgcccgatccgcccacaaggctctactattatcgaagctggcgatgaggtgttctttgttgccgcatcacagcatatccgcgcggtaatgagtgagctgcagcggctcgaaaagccctacaaacgcatcatgatcgtcggtggtggtaacgtgggtgccggactggcgcatcggttggaaaaatcgtacaacgtgaagctgattgagaaaaaccagcaacgtgccgccgaactggcagagcaactgcacgataccatcgtgttttacggtgatgcctccgatcaggagctgctggccgaagagcatgtcgagcaggtagacgtgtttatcgccatcaccaacgatgacgaagccaatatcatgtctgccatgctggccaaacgtatgggcgccaaaaaggtgatggtattgatccagcgccgtgcctatgtcgatctggtccagggcagcgtaattgatatcgcaatttctccgcagcaggctactatctccgcgctgctgggccacgtacgtaaagccgatattgtcagcgtctcttcgctgcgccgcggcgttgccgaagccattgaagcgattgcccatggcgatgaaagcacctccaaggtcgtaggccgtatggtcgaagagattaagttgccaccgggtaccactattggcgcgatcgtgcgcggcgatgatgtgatcattgccaacggtaacagccggatccagcaaggtgaccacgtgatcatgtttattaccgataagaaatttgtgccagacgttgagcgcctgttccaaccaagcccgttcttcttatagatacttaaatcatgcgaatgattttttgatacatcccagtcgagaattaggaaaaacaaaaaattttcctatactgattgtgtcaaaggggaattgctttgttaaaattgcgttactaattttttgaggggtgttctgatgggtatgttaaaagagttccgcgaatttgccatgcgtggcaacgtggtcgatctggcagtgggtgtgatcattggtgcggcattcggcaaaatcgtttcttctctggttgccgacatcatcatgccacctttggggctgctgatcggtggcgttgatttcaaacagttccatctggtactgcgtgaagccaaagataatgtcccagcggtagtgatgaactatggctccttcctgcagaatatctttgatttcgtgatcgtcgcctttgcgatctttatggccatcaagttgatgaacaaaatgcgccgtaaagaagttgaagagccagccgcaccgcctgcgccaaccgcagaagagaagctgctgacagaaatccgcgatctgctgagtcagcaacagcaacccaagctgtaattcaccgcttataacgctaaaagccatctttcaagatggcttttttgtggcttaaaaccagaaggccagtggtaaattgtcgttgggcaatttaccactggcctcccagttaccgccttttgcatgtttgtctttacgccgatagctacctttccctttactgttcttttctacccgttggcggaaaagaggatcgtgtagcaacgcctcaatggcattgtcctggatcttgcctttggtatgacgatattgagtcattttggtcttcctgttggttggtgataataaacgcgccgataatactgctggccagataaaaattaaagccctatacgccgttaaaccgcacttttggctttctcttcgctggctccctgctccaaagcctccagaatcgagcaatagttactggtgtgctcgctaccacagcaggcatcgctgagccttttcagcgactcacgcattctggttaactcggtcagtttgctttcaacctcatgcagccgcgcatcaacgatagacttcgactcttcgcaggtgtgatgctctggatccacacggatcgacagcaactcggcgatagtttccagcgtgaagcccagctgcttggcatagcggataaaacgcaggcgctgtaagtcctgatcgctatacagccgatagccgccttcggtacgaacgtggtgatccatcatgccttgcttctcgtaatagcgcaccgtatctggcgttacgtcagccaacttggctaattgcccaattttgaacatcatgacttctccgtgttgcacttatcactgatagcctgagcatagcggatgtggggaaggatcttaagcattgcagggagaggaaagcacatttggctagctacagacgtaaaaaaaccgggcaagcccggttttttacgcttccacagattactctgcagttgctacttctgcttgagactcagcacgatcaaccagctcgatgtatgccatcggcgcgttgtcgcctgcgcggaagccacacttcagaatgcgagtgtaaccaccggcacggctcgcaaaacgcgggcctagctcgttaaacagttttgccacgatctcgttatcacgagtacgggcgaatgccagacgacgattagcaacgctgtcggtcttggcaagagtaatcagcggctcaacaacgcgacgcagctctttcgcttttggcagggtcgtcttgatgatctcatgacgaaccaaagagccggccatgttacggaacatagcctggcgatggctgctgttacggttcagttgacgaccactcttacgatggcgcatgaccttatccttctcagtaaaaccttaacctgtgatccggttactcgtcagcaatgctagccggtggccaattttccaggcgcatgcccagagaaagtccacgggaagccagcacgtctttaatctcagtaagagattttttacccaggttaggcgttttcaacagctcaacctcggtacgctgtaccagatcaccgatgtagtggatagcttctgccttaaggcagttagcagagcggacagtcaattccagatcgtcaacagggcgcagcaggatcggatcgaactctggtttctcttctttcacttccggctgacgtacatcacgtaggtcaacgaaagcttccagttgttcagccagaatggttgccgcacggcggatcgcctcttcaggatcgatcgtgccattggtttccatctcgatgaccagcttgtccaggtcggtacgctgttctacacgcgctgcttcaacattgtaggcaatacgctctacagggctatagcaggcgtcaaccaacagacgaccaatcgggcgctcatcttcttccgaatgaattcgggcagaagccggcacataaccacgaccgcgctgaactttgatacgcatgctgatagcagcgttctcatcggtcaggtggcagataacgtgctgcggcttgacgatttcgacatcaccatcatgggtaatgtcggcagcggtcacagggccaatgccagatttattcagggtaagaataacttcatctttcccttgaactctcaccgccagccctttcaggttgagcaagatctccaggatatcttcctgtacgccttctttggtgctgtactcatgtagtacaccatcaatctcaacctcggtcaccgcgcaacccggcatagatgaaagcagaatacggcgcagtgcgttgccaagagtatggccaaagccacgctctaacggctcaagggtcaccttggcgtgcgtcgaactgacttgctcgatatctaccaggcgcggttttagaaactctgtcacagaaccctgcattgtgtcctctctttgaaactcaagccttacttggagtaaagctcgacgatcaggtgttcgttaatgtcggcggacagatcggtacgttcaggaatacgtttgaacacaccttccatcttcgcagcatcaacttccagccaagtcggcttttcacgctgctcagccagctccagagaagccttaacacgagactgctttttagctttctcgcggatgctgactacgtcattcggagatacctgataagaagcgatgttaacaacgcgaccatttaccataacggctttatggctaaccagctgacgtgattctgcacgagtggcgccgaagcccatacggtaaactacgttgtccagacgaccttccagaagggtcaacaggttttcaccggtgttgcctttcaggcgggttgctgctttgtaatagttacggaactgacgctccagaacaccgtacatacggcgaactttttgcttttcacgtaactgtacaccgtagtcagacagacgcggtttacgcgcaccgtgttgaccaggtggctgttcaattttgcactttgaatctatcgcgcgaacgccagacttcaggaacaggtctgtgccctcgcggcggctaagcttgagcttaggacccaaatatcttgccattttctttctccaacaatccgaaaagcaggggcgttacacgcgacgctttttcggtggacgacaaccgttatgaggaatcggagtcacatcggtaatattagtgatgcggaaaccagccgcgttcagagcgcggatagtagactcacgaccaggaccaggtcctttgaccataacttccaggttcttgataccgtattctttaactgcgtcagcacaacgctcggctgcaacctgagctgcaaacggagttgacttacgagaaccacggaaaccggaaccaccggctgttgcccaacccaaagcattaccctgacgatcggtaatagtcacaatggtgttgttgaaagaagcatggatatgagccacgccgtcagagacttgttttcttacacgcttacgtgtacgaacaggtgcctttgccattattcaatcaccccgattatttcttgatcggtttacgcggacccttacgggtacgtgcgttggtcttagtacgctgaccgcgaactggcagaccacgacgatggcgtaaaccacggtatgtaccaagatccatcagacgcttgatgctcagggtaacttcacgacgcaaatcaccttcaacagtgaatttggcaactgcttcacgcagttgttcaatttgctcttcagacagctcactgatcttaacattttcagcaatacccgtctcagcacagatagactgtgaacgagttttgccgattccgaagatcgacgttaacgcgataacggtatgtttatgatcaggaatgttaatgcctgctatacgggccactatgcactcctactaatttttacggcaacaccattctgaaaagcccgttttcaggatactcaaataatgttgcagctacatacaaaagattggctggctaatctagccagctcaacccaactttgcaagaaaaatatgcgagataatcagccttgacgctgtttatgcttcggctcggcgctgcaaatcacacgaacgacaccgttacgcttaacgattttgcagttacgacataatttcttgacggaagcacgaactttcatttttactctccgtaacttctcaaacgcaccagattagcggttatagcctttcaggtttgctttcttcaatgcagactcgtactgacttgacatcatcagagtttgcacttgagccataaagtccatgatgacgacaacaacgatcagtagcgaggtaccaccaaagtagaatggtactttcattgcatcacgcatgaactccgggatcaggcagatgaaagtaatgtacatcgcgcccaccagggttaaacgcgtcatcactttatcgatatatttcgccgtttgctctcccggacgaattcctggtacgaaggcaccggacttcttcaggttatctgctgtttcacgcgggttgaaaaccaacgccgtgtagaagaaacagaagaagatgattgcagacgcatagagtaacacataaagcggttgtccaggctgcaaatacagcgaaatcgttgtcagccagttccaaccggtaccgcccccaaaccatgatgcaatcgtggcagggaacagaataatgctggaagcgaagattgccgggattacccctgccatgttcactttcaacggtaagtgtgtgctctgtgctgcgtaaacacgacgaccctgttgacgtttcgcatagttaacgacgatacgacgttgaccacgttcaatgaaaacaacgaagaaggttactgcaaacactaatactgcaaccaacagcaacaagaggaagtgcaggtcgccttgccgagcttgctcaatagtatggccaacagccggcggaagacccgccacaatacccgcgaagatnnnnnnnnnnnngggaagccccgccacaatacccgcgaagataatgattgagataccgttaccgataccacgctcagtaatctgctcgcccagccacatcaggaacattgtcccggtaaccagactcacaaccgcagtaaagtagaacgcaaagcctgggtttaacaccaggccctgcataccaggcatattcggcagaccggtagcaataccgatcgactggaatatggccaacaccagcgtaccgtagcgggtgtactggctaatcttgcgacggccagcctccccttctttcttgatttccgccaacgctgggtgaaccaccgtcagtaactggataatgatcgaggccgaaatgtacggcatgatccccagagcaaaaatagaagcacggctgagagcaccaccagagaacatgttaaacatttcaatgatggtgcctctctgctgttcgagcagtttggcaagcacagtggcatcgataccaggaatcggaatgaaagagccaatgcggaaaacaatcagcgcgccgataacaaacaaaagtctgcgcttcagctcaccgagtccgcctttagcactttgaaaatctaatcctggttgcttagccatcagcttacttattcctcaattttaccgccagcagcctcgatagcaacacgagcgcctttggtgacacgcagaccacgcagggtaaccggacgagtgatttcgccagaaagcataactttcgcgaactcgatctgggtaccaacaacgttagcggctttcagcgtgttcaggtcgattacgtcgccttctacaagagccagttcagacagacgaacttctgccgtgatcatagctttgcgcgaggtgaagccgaatttcggcaaacgacgatataaaggcatctgaccaccttcaaacccacgacgtacgccaccgccagaacgtgagttctgacctttgtgaccacgaccggcggttttacccaggccagaaccaataccacgacctacacgcttaggcgcatgcttggcaccttcagccggagacagagtatttaaacgcatctgttactcctcaaccttaaccatgtaggaaaccaggttgatcataccgcgtacagcaggagtatcctcgcgctctacggtgtgaccaatacgacgcagacccagaccgagcagtgtagctttatgcttcggcagacggccaatggagctgcgaacttgtgtaactttgatagtcttagccatggtcaattaccccagaatgtctgcaacggatttaccacgcttggcagcgaccatttcaggagacttcatattagccaaagcgtcgatagttgcacgaaccacgttgatcgggttggtggaaccataagctttagccagtacgttgtgcaccccagcaacttcgagaacggcgcgcattgcaccacccgcgatgataccggtaccttcatgagctggctgcatgaacacacgggaacccgtatgagcacctttaacagggtgctgcagggtgccgccgttcagcgcgacattcatcatgttgcgacgggctttttccatcgctttctggatcgctgctggaacttcgcgtgctttgccgtagccaaaaccaacgcgaccgttaccatcaccaactactgtcagtgcggtaaagctgaaaatacggccaccttttacggttttagatacgcggtttaccgcgatcagcttttcctgcagttcgccagcttgtttttcgatgtgagccatcttaaacctcttccttagaactgaaggccagcttcacgggcagcatctgccagtgcctggactcgaccatgatattggaaaccggaacggtcaaaggatactttcgcaatccctttttccaacgcgcgctcagccagagctttacctacggctgctgctgcgtctttgttaccggagtacttcaattgctcagtgatagctttttctaaagtagaagcggctaccagaacttcagaaccatttggagcaatgacctgtgcgtaaatgtgacgcggggtacgatgtaccaccaggcgggttgcacccagttctttgagcttacggcgtgcgcgggtcgcacgacggatacgagcagatttcttatccatagtgttaccttacttcttcttagcctctttggtacgcacgacttcgtcggcgtaacggacacccttgcctttataaggctcaggacggcggtaggcacgcagatctgcagcaacctggccaataacctgcttatcagcgcctttcagcacgatttcagtttggcttgggcattcagcagtaatacctgctggcagctggtgatcgattgggtgagagaagcccagggctaaattcaccacgttgcctttaacagcagcacgataaccaacacctaccagttgaagcttcttggtgaaaccttcggtaacaccgacaaccattgcgttcagcagagcgcgcgtggtacccgcttgggcccatgcgttagcaaaaccttcgcgtggtgcgaaagtcagtgcgttagcttcttgcttcacttcaacggcgtcatggactgtacgagtcagctcgccgttcttacccttaaccgaaataacctgaccgttgagttttacctctacgccggcaggaatgacgacgggtgcttttgcaacacgagacattctttcctcccgaattaagctacgtagcagataatctcgccaccaagaccagcttggcgagctgcacgatcggtcataacacctttagaggtagaaataacagcgatacccagaccggccataacttttggcagtgcatcttttttcttgtagatgcgcagacctggacgactgatacgctgaatgctttctaccactgccttaccctggaagtacttcagtaccagttccagaacaggcttggtgtcgccttcaattttgaaatcttcaataaaaccttcttccttcagcacgttggcaattgccactttcagcttggaggaaggcatggtgaccgcaactttgttcgcggcttgaccgttacggatacgggtcagcatatccgcgatcggatcttgcatgctcatctgtctttactcccgtgattcaattggtaattaccagctagcctttttcaagcctggtacttcaccgcgcatagcggcttcacgtagcttgatacggctcaacccgaatttgcccacataaccatgtggacggccagtttgacggcagcgtttacgctgacgagacgggctggaatcacgcggcagagactggagcttgagaacagcatcccaacgatcttcgtcagaagagttcacaccagaaatgatagctttcaattcctcgcgtttagcgcggtacttgtcagccagtttcacgcgaacgacttcgcgtgctttcattgattgcttagccatcagtaaccctgccttacttgcggaacgggaagttaaaagcagccaacagcgcgcggccttcatcatcagatttcgcagaagtggtaatggtaatatccaaaccacgaacgcgatcgactttgtcgtagtcgatttctgggaagatgatttgctcacgcacacccatgctgtagttaccacggccatcgaatgacttggcggacaagccacggaagtcacggatacgtggaacagcaatggaaatcagacgctcaaagaactcccacatgcgttcgccacgcagagttactttacagccgatcggatagccctggcggattttgaagcctgcaacagatttgcgtgctttggtgatgaacggcttttgaccggagatagctgccaagtcagctgctgcattatccagcagtttcttgtcagcgatcgcttcaccaacacccatattcagggtgatcttctcgacccgagggacttgcatgacagagttgtaatcaaactgagacatcagttgtttgactacctcgtctttgtagtaatcatgcagtttcgccatcgtcatactccaaattacttgatagtttcgctatttgatttgaagaaacggacttttttgccgtcttcgaatctaaagcctacacggtcagccttaccggtagccgagttgaacagcgcaatgttggaaacctgaatagcagcttctttttcaacaatgccacctggttggttcagggccgggaccggcttctgatgtttcttaaccaggttgataccttcaacaatgaccttaccagcagacaggacattttttactttaccgcgtttacctttgtctttcccggtaagcacgataacttcgtcatcacgacggattttcgctgccatggttcgctccttagagtacttctggtgccagagagataattttcatgaacttctcattacgcagttcacgagttaccggcccaaaaatacgcgtaccgataggttgctcgctgttattgtttaaaataacgcatgcattaccatcgaagcgaatgacagaaccgtccgggcgacgtacacccttcttggtgcgcaccactaccgccttcagcacatcgcctttcttcaccttaccgcgaggaattgcttccttgatggtaattttgatgacgtcgccgatgcctgcgtagcgacggtgcgagccacctagaaccttgatacacattacgcgacgtgcaccggagttgtcggccacgttcagcatagtctgttcttggatcatgttagtgctccgctaatgtcaactacaactttaggacccattactaggtcgttgaaaagccccataaccgagggcgcagcattataacaccgcttccagagtatgggtagaaaaaataaacggctcactttctgagccgtttattaagttagagtcagctactctattacagaatcgctttatctacaatgcgaaccaacgtccatgacttagtcttggacagtggacggcattcgcggatttctaccacgtcgccgataccacattcgttgttctcatcatgtacatgcagcttagtcgtacgcttgatgaatttcccgtagatcgggtgcttcaccgtacgttcgatagcaacaaccatggatttctccattttgtcactaacaacacgaccttgcagagtacggataatatcagtcattttacgcacccgccttttcagtcagtaaagtcttaacgcgtgcgacattacgacgcacttgtttcaacaggtgagtttgttgcagttggccactcgccgcctgcatgcgtaagttgaattgctcacgcagcaggttgagcagctcagtgttcagctcttcaacacttttttcacgcagctcttgtgctttcattacatcaccgtcttagttacaaaggtggttttgatcggcagtttagctgctgccagcttgaacgcttcacgggcgacttcttctggaacgccgtccatttcgtacaggactttgccaggttggatcagggcaacccaatattccacgttacccttacctttacccatacgcacttcaagaggcttctcggtgattggtttgtccgggaatacacggatccaaatcttaccttgacgcttcactgcacgagtcattgcacgacgagctgcttcgatttgacgagcagtcagacggccacggccaacagctttcagaccgaaagtgccgaagctaacatccgtaccttgcgccagaccacggttgcggcccttgtgcaccttacggaattttgtacgctttggttgtaacatcagcgactctccttacttgcggcctttacgctgctgctttttaggttgagcagccggttccggttgttcaactgcagccataccacccaggatctcacctttgaagatccataccttaacgccgattacaccataagtggtgtgcgcttcagatgtgttgtaatcgatatccgcacgcagtgtatgcaacggaacacgaccttcacggtaccattcggtacgcgcaatttcagcaccgccaagacggccgcttacttcaactttgatacctttagcgccaagacgcattgcgttctgtacagcacgcttcatagcacgacggaacataacacgacgttccagctgtgaagtgatgctgtcagcaaccaattttgcgtccagttccggtttacggacttcggcgatgttaatttgcgcaggaacgccagcgatatccgctacgaccttacgcagtttttcgacatcttcacctttcttgccgataacgatgccaggacgagcggtgtgaatagtcacacggatgctcttcgctggacgctcgataacgatgcgagaaacggaagctttcgccagttctttagtcaagaattggcgaactttaaagtcgctgtccaggttgtcagcgaattctttggtattcgcataccaagtagagttccaaggtttgacaatacccaggcgaataccattaggatgtactttctgacccattgctagtctccagagtctcagcgatcggacacaaccacagtaatgtggctggtgcgcttcaggatgcgatctgcacgaccttttgcacgaggcataatgcgcttcatgcttgggccttcgtctacgaagattttcgtgactttcagatcatcgatgtcagcgccatcgttgtgttctgcgttagcaatggcagactccagcactttcttgaccagaccagcagctttcttgttggtgtaggccagagtttccagagcttgcgacactttcttaccgcggatcaggtctgcaacaaggcgaaccttctgagcagaagaacgagcgtggcgatgtttagcgatagtttccatctcttcctcctaccttagcgctttttagcttttttatcagccgcatggccgcgataagtacgagtcggcgcgaattcacccagtttgtgaccgaccatttcatcggaaacaaatactggtacgtgctgacgaccattatggacagcgatggtcaaaccgatcatgttaggaaagatcgttgaacgacgggaccaagtgcgcaaaggcttcttgtcaccgctttccaccgctttctctaccttcttcagcaagtgcaggtcaataaaaggacctttcttgagagaacgtggcatggcttatcctctaattattttttactacggcgacgtacgatgaacttgtcagtacgcttgttgctacgggtcttcttacctttggtctgaacgccccacggagttaccgggtgcttaccaaagttacgaccttcaccaccaccgtgcgggtgatcgactgggttcatcgccgtaccgcgaacggtaggacgaataccacgccaacgtgcagcacctgctttacccagaacgcgaagcatatgttcagcgttaccgacttcacccagggtggcgcggcaatcaactggaactttacgcatttcgccagagcgcagacgcagagttacgtaggaaccatcacgtgcgacgatctgaacgtaggcaccagcagaacgagccagctggccgcctttacctggtttcatttctacgttatgaaccgttgaacctactgggatgttgcgcataggcagggtgttacccgctttgattgcagcatcaacaccagattggatctggtcaccagctttcaggcctttcggcgccaggatataacggcgttcgccgtctttgtacagaaccagcgcgatgttcgcggaacggttcggatcgtactccagacgctcaaccacagcagggataccatctttgttgcgtttgaagtcaaccagacgataatgttgcttgtggccaccaccgatatgacgggtggtgatacggccattgttgttacgaccaccgcttttgctcagtttctcaagcagcggggcataaggtttacccttgtgcagctcagggttaaccactttaacaacgtggcgacgacccggagatgtaggtttacatttaacaattgccattgttcttactcctccgacttactctgcgccgccgatgaagtccaagttctggccttccttcagggtgacgtaagcttttttccagtcgctacgacgaccaacacgctgaccttgacgcttcactttcccttttactaccagggtgttaacgtcttcgacttcgacttcaaacagtttctgcactgcagctttaatttctgctttggtcgcgtctttggcaactttgagtacgatggtgttgcttttttccatcgcagcggatgctttttcagatacgtgcggtgcacgcagcactttcagcaaacgttcttcacggatcatgccagcatctcctcaacttgcttcacagcatcagcagtcataaccactttgtcgaaggcgatcaggctaactgggtcgatacctgctacatcgcgcacgtcaaccttgtacaggttacgagctgccaggaacagattctcatccagttcaccggtcacgatcagcacatcttccagggccatatctttcagtttctgtgccagcagcttagttttaggcgcttctacagagaacttctcgacaacgatcagacgatcttgacgtaccagttcggacaggatgcttttcagcgcgccgcggtacatctttttgtttactttctgactgtggtcttgtggcttcgcagcgaaggttacaccaccagaacgccagatcgggctctttacagtgcctgaacgcgcacggcctgtacctttctggcgccacggttttttaccggaaccagtcacttcagcacgggtcttctgagcacgggtaccttgacgggcacctgctgcataagcaacaacaacctggtgtaccagcgcttcgttgaaatcacgaccgaaggtagtttcggaaacagtcagcgcgctttgcgcgtctttcaatactaattccattgctatccccttacgccttcacagctggtttaacgatcaggttgccaccggttgcgcccggtacagcacccttaaccagcagcaggttgcgctcagcgtcaacacgtactacgtccaggctttgaacggttacacgctcgtcacccaggtggccagccattttcttgcctttgaacactttgcccggagtctggttctgaccgatagaacccggaacgcggtgagacaaggagttaccgtgggttgcatcctgagtacggaagttccagcgctttacagtgccagcaaaacctttacctttggaagtaccggtaacatcgacttttttaacgtcagcgaagatttctacgctgatttcttgacctgcagcgaactcttgaccttcttcaaggcggaattcccacagaccacggccagcttcgacgccagctttagcgaaatgacccgcttccggtttggtcacacggttagcttttttgctaccggtagtgacctgaatggcacggtatccgtcgttgtccaggtctttaacctgagtcacgcggttcgcttcaatttcaatcacggttactgggatagaaacgccatcttcagtgaagatacgagtcatgcccacttttttaccgactaaaccaatcattgtttcaacctctcaatcgtcaatgacctgattaacccaggctgatctgcacgtctacaccggcagccagatccagacgcatcagagcatcaacggttttctcagttggctcaacgatgtcaaccagacgcttgtgagtgcggatctcgtactgatcacgcgcgtctttgttgacgtgcggggagatcagaacggtaaagcgctctttgcgagttggcagcgggatcggaccacggacttgcgcaccagtgcgcttggcagtctcgacgatttccgcagttgattgatcgatcagacgatgatcaaacgctttcaggcggatacggattctttggttctgcatgagaccagagctccaattatttataaacgtaaataattactcctcacacccatttcgattgatgggggagtgtaatcgtcaacatataacccccatatcgggagtattgttcgaagggcaaaacgttcttgccaatcgactgattcgctaaaatcaggcttaccaagattaggtaagcccgcgcattatacgcaaaccaggccaggttgcaagccacggatggaaatatgctcagaatgagcggtatttaatgagttttgcccctcccccgcccctctcctttagtaatagggagccgatcggcactattggcaagtgcaggagataatctgtaacgggagaatgtgagggctgttatggcgttaaagctgatctgtaatagtggaatataaaggaagaatgcctcagttaagttagagcatggactgtccctctccctgtgggagagggttcgggggtattcagtctttgcgttccagcacttgcgcctggcaatagttttggatgccaagccgctcaatcaagctcagttcagtctccaaccagtcgatatgcccttcctcatcggccaagacttctttcatcagatcgcggctgacataatcatggatagagtcggcataggcgataccttcccgcaggttcttggcgccgtccagctccagggccaaatcggacctcagcatctcttcgacatcttcgccgatattcagcttgccgagatcttgcaggttcggtaacccttcaaggaacaggatacgctcgatgtagcgatcggcatgtttcatctcatcgatcgactcgtgatattccttctcattgagacgcatcaggccccaatttttgaacatacgcgcgtgcaggaagtattgattgatggcaaccagctcgttaccgagcagcttgttgaggtgagcaatgatctttttatcgcctttcataggtaaatcctcctgggcagttctaaaagtgtagaagctgcgggccaagagtcaaaaaataaccctactatttattaggcgacttcatgcatatgaatcagggttgcgcgttcctccaccataatttgccttgcctgacgaatgcatttaccgcagtcagttccaatcggcaccagctcacgcagttgcttcatggtatggggattgtgctgacgcaccgccttacggatcgctttgtcagacacagcattacacagacatacgtacatagagagactcacttcttaaccgatgcagtaagtctaaataagaatcgtttttatttcaattaagattggtaaaaaattgtataaaaaaagggcaccaaagtgccctcttttagtgcttataaattattcgcgattaagcgataactttagcaacaacgcccgcacctacagtacggccgccttcacggattgc

SEQ ID NO: 370 - DNA, 654 bp, unknown
  Altogen  635822 strain
  misc_feature (486)..(615): n is a, c, g, or t
gattccgccgggtttaccacaaacaacctaatgattaaaagttggtatggagtagggttttataacacttgccccacgacaggtgttcaaggggtatctggttatattgatgttcgtgcgggtgacttacgcatgaaacgcaatgttactgctgatgggcaagtcattgaggcgggtaaacgtgtttactctccaaataataagccaacctctgaggatgtaaatgcctggaacaaagtcgaggctgatgaccgttatttaatgaaaaagggcggtcaattatcaggcattgtaaaaaccagcgctgaaatacaatctaccagtcaaaataactaccgaattacgagcgggaattacggcacattctggcgtcaagatggtacggcactatacttgctgatgactaatgctggtgaccagttggggagctatagcagccatcgcccctttgctgtttcaatgacatcaggtggggtgacgttaggnnnnnnnnnnnnnnnnnnnnnnnnnnnnnnnnnnnnnnnnnnnnnnnnnnnnnnnnnnnnnnnnnnnnnnnnnnnnnnnnnnnnnnnnnnnnnnnnnnnnnnnnnnnnnnnnnnnnnnnnnnnnnnnnnnggttggtcaaagcgccgaggtgtccttacataataaata

SEQ ID NO: 371 - DNA, 1529 bp, unknown
  Altogen  635822 strain
aattagtgttcatcccaacttcgacccaaccctctccgacaaggaacatgagggaataaatcagcgttcaacccaacctaacgtgcgtttggcaaaggcatcgcgcatggccggtagctgctccattgccatcagccccagattacgcccagcgaccagcggcgcgtagctattggcaaacaggcggatcaaaccgtcggtaacgccaatggtcgcctgctgatcctgttgccgacgttgctgatattggctcaatagcgcataggcacccaaatcggtgccagcctgcgcggcttctgcgagggtttccgccagcgacatcacgtctcgcaaacccagattgaatccctgcccggcgatcggatgcagcgtttgcgccgcgttgccaaccagcgccagacgatggctaacgtgctgattggccctcagcaggctaagggggtaactgtggcgcttacccgccttcagcatcttgcccaaccgccagccgaaggcccgttgcagctcactgagaaaacgctcatcactccagctatcgacctgctgacgagcttcccgtgcgtggcaccacaccagtgagctacgcccgccagacattggcaacagcgccaacggcccgtagcgggtgaaacgttcgaacgcccgcccttgcggagcctcggccgtcgaaacgttggcaatggtggcaaactgcgggtaatcactctgctgccactggatattacaggcctgcgccagcgccgaacgtgaaccgtccgccgccaccagtaactggcccgtcaggcgctgcccgttatccaactgcacttcagcgcgatcggcggtgcgcagcacatcgaccactttagccgggcaatgcagggtgatcccaggggcctttgccagcagggcaaacaaccgctgcccagcgtcgtgcagttcaatcacctgccccaacgcctccacctgatagtcctgcgcatgcaggttcacaaaaccggcatgcccgcgatcgctgacgtggacgtgagtgatcgccgtggcacagtcccgcaatgcagcccaaacgccgattcgcgccagctgttggcaggttccctgcgccagagcaatagcccgtgcatcaaagccaggatgcgcacgatcgtctggcagggttgcctccaccagatcgacggccaccttgccctgagtcaaagatgaaatcgccagcgccaacgtagcgcccgccatcccaccgcccacaatgattacgctcatgttatctggccgccgccatcagggcttcaatcgcgtcggcatccttcaccacgctggcggtcaaattctcattaccgtcctgggtgatcaggatgtcatcttcgatgcggataccgataccgcgatactcctgcggcacatcagcatccggtgcgatatacaagccaggttctatcgtcaacaccatgcctggctccagcacgcgatcgcggctcgctgagccatagtggcccacgtcatgcacatccagccccaaccaatggctcaggccgtgcataaagaactggcgg

SEQ ID NO: 372 - DNA, 1842 bp, unknown
  Altogen  635822 strain
  misc_feature (1708)..(1794): n is a, c, g, or t
caaatctaagaaagcaagatgaaaccttaaccagaaaacaaaaccggcaaactgtggttgttaaacctgtagtgaataaagtctctaaaggtaaaaacggcaaggatgttattgatgtcgatttaattgttgccggcgtcggttttgttagtggtggattgcagtttgtaacgggagttggtgttgccagtagcggtgcaagtgtacctattgggggcctgttaattgcccacggcataaataatgtcgttgagaatggatattttcttctttatcgggaaagttatactggcccgcttaaatttatttatgaaggtgttggggctttgttaggtataagtgccaaggatgcagatgtcatctatacggttgtcgatctaagtctatcaataaatagtttgcttggcctgcgattagaagaggatgccgtgcgattataccgctatattgacactgatctactttggggaatgaaagaaatgggcattaagttaatgactagaaatgaattgctattagagtattatggtgatgttaatactataattgggcagtataactcatataaggctgcaaaatgagctacttatattcacttttttcagttgtcaccttatggcctttgtttttgattgttcgtaagttgtcatcatcattttatccctacactaggtttggtgcattagttgtaattaccttgtttatggtgtttcacctatatatcttccatttcaaagagattccatttttagggattgccgttccagaagataatgagtttatggtatacgcgccttttctgtatggattattatgtacgatagtgagtatgaaagcatttaagtagttaaattatatatggacagccaagtttatgatgtgttttggttgtattgtttgatttttcgagagagtgtatgagctatatttattcattgatttcaattgcataattagtacctttgtactggcttataaagcgactgacatcatctgattatccatacactagattttgtgccatcttggtcgcatcattattcatgctgtttcatatctatgtcttcaatttccaaaaaattcctgttcttggtattgccgtaccagaagataacgagatcatgtcatatgccccatatttgtatggattgttgaccgctgccgtctgtgcagtggctcataataaaagtaaaaactaatcaatgacagagaggattgaagactatatctctctgtctctgctttttttaataaagttttgaagtgatttcatgagctatatatactctattttctctatcataggtcttgttattttatactttgcaaatagaaggttgacatcgtcttactaccctctgcataatttttatggagtcatgatttctttcttgtttgttcttttccatatgatagttttgagagttcatgtgatccctattttggggatccccgttccagaagacgacgacttcatgtactacggtccgctcatttatgctctattatgtgtggtgataagcatgttggctcatggtaaaggtagacagtgagttatctattttcagcagtaatgtttgaatgaatatctattataagaaagctgctgatatagtaagggatggcattaaccatcccctttatatcaatagactctgtcatcccaaatgctgtaaccactggtgcccgcaatgatatggctccaggnnnnnnnnnnnnnnnnnnnnnnnnnnnnnnnnnnnnnnnnnnnnnnnnnnnnnnnnnnnnnnnnnnnnnnnnnnnnnnnnnnnnnnntgaaatggtggcatcagtgagtaagatggtgaagtaaagctcttgcgc

SEQ ID NO: 373 - DNA, 100 bp, unknown
  Altogen  635822 strain
ctgcgccgccatagagcctagaccacttcagggtcaggttgaggcgttcccatagcttcagttcttcaaatcgagcctcaagaatacctcggcgttttgg

SEQ ID NO: 374 - DNA, 100 bp, unknown
  Altogen  635822 strain
ggataaacccaccgaaggtgagatgcagatcaaaggtatctccacccaactcgccagcagtgagcagttggccgagttacgcagccagtacatcgggttt

SEQ ID NO: 375 - DNA, 101 bp, unknown
  Altogen  635822 strain
atcaacgaactcgatcggttcccgtagggtgagggagctgtacggcttttttgatgaggttgtgctgcttcggaaaatagggaataaaaacaagaaaggca

SEQ ID NO: 376 - DNA, 102 bp, unknown
  Altogen  635822 strain
agggagcgatcgtgttttctgagattatctatttacgtccaaaagagccgttcgagttcattgattgctctgcataatcccctaccttgcttcttcttactc

SEQ ID NO: 377 - DNA, 102 bp, unknown
  Altogen  635822 strain
cttgcaatgaatacgcaatttgtaggcaacctcatcagtcgacttccccttcaacagaaaacccaacacactgagttcccgatgtgttaaggggatgactga

SEQ ID NO: 378 - DNA, 102 bp, unknown
  Altogen  635822 strain
cgtggctacacacaggactgttttggcgtccagcttactctggctggacactggggggattcaaatatgaatgttgaggcacaaagcctgtcagctggcggg

SEQ ID NO: 379 - DNA, 103 bp, unknown
  Altogen  635822 strain
aacggtgtcgatatgttggagcgccatcgccgcaatatcggcctgtcgtaatttacctgcggtcagcgtggctggccgctcctttcccctgattaattacgtg

SEQ ID NO: 380 - DNA, 103 bp, unknown
  Altogen  635822 strain
ccgcatgacaggacaaacgctttaataatgtctgatattatctggtcgcgttgattacgctttttcatgatattccaatctcgttatatgttggccttggggg

SEQ ID NO: 381 - DNA, 103 bp, unknown
  Altogen  635822 strain
aagacgaggacgaaaaagacgagtctgagggggctgtgactggcgatgctgcttaccgtgctgatctgatccaacccggtatccagttgccagccaaggcgaa

SEQ ID NO: 382 - DNA, 103 bp, unknown
  Altogen  635822 strain
tggatccgccggtacgacatcaccgtccgcctgcgccgcaaaattatccgcgaatacggcatcaagtcgatcgcagaggcaccggttcaattcttcggagaat

SEQ ID NO: 383 - DNA, 103 bp, unknown
  Altogen  635822 strain
ttcgccttggctggcaactggatccccggttgaatcaggtcagcgcgataagctgcatcgccagtaacagccccctcgccctcgtctttttcgtcctcgtctt

SEQ ID NO: 384 - DNA, 104 bp, unknown
  Altogen  635822 strain
gcgtcgagctgcacgccgatggccgcatccagatcaaagtcggttaccaactggttcgttgcgttttggatatttacaaaaggctgggtgattaacgaaatgtg

SEQ ID NO: 385 - DNA, 104 bp, unknown
  Altogen  635822 strain
tcctgcaacagcttgacgataggttccgactccagcgccagggtgcgcgcgatagcctcctgctgacctgccggatacagggaaatcagcgttgctttgcgctc

SEQ ID NO: 386 - DNA, 104 bp, unknown
  Altogen  635822 strain
tcagccacaccgcgttgcagtttgtcccacttggccttggccgcccgcatggcctgcgtcttggtggcgtaaatggtggtcagtgcaaacacgttgtcggcttc

SEQ ID NO: 387 - DNA, 104 bp, unknown
  Altogen  635822 strain
ggggccgagtttattttttatggcctgtggcggcacatcgaggaaattaaatcgctggaaagcgtggacgttctctggaatgaagaggcccacgcgataacaga

SEQ ID NO: 388 - DNA, 104 bp, unknown
  Altogen  635822 strain
gtaatgaccatgcaacagcctatctctattgcgccgttactctggaacaaccagacggcccgcacgattgataccactatcacccacggcaaagggcgtcaggg

SEQ ID NO: 389 - DNA, 104 bp, unknown
  Altogen  635822 strain
gtttcattgtaataaaactcggcgagttgggcatcggccaccctcagacgtaagccgttagcctgccggtgcgcctttccggcaccgtccgtgtaggttgtaaa

SEQ ID NO: 390 - DNA, 104 bp, unknown
  Altogen  635822 strain
cacatttcgttaatcacccagcccttagtaaatatccagaacgccacgaaccagcaggtaaccgactttgacctggacgccgccatcggcgtgcagctcgacgc

SEQ ID NO: 391 - DNA, 106 bp, unknown
  Altogen  635822 strain
cataaaatgcgggctcttggggtggtggtgtttccctggtgttgccataagaagcccattaaccctagtggaatgactaaaaaccgtccaatcgattcgctagatc

SEQ ID NO: 392 - DNA, 107 bp, unknown
  Altogen  635822 strain
cgtaaggttgatgtgggggctcaggtcagcggacagctagagagcctgaaggtcgagattggcgataaggtgcaaaaaggccaactgctcggcattatcgatcccca

SEQ ID NO: 393 - DNA, 107 bp, unknown
  Altogen  635822 strain
cccgccgctgttggctgcggtactcacctgggcaatggggtgtgccgccgtccctggcggggtgagatcggtgttgttggccagggtcaacggccaaggggaggtcg

SEQ ID NO: 394 - DNA, 107 bp, unknown
  Altogen  635822 strain
ctcccagctgagctatagccccacaaaagtggtacgcgttaaccgtgcgttacggtattccccaaccttcctgagataaaaggttggtggagctagacgggatcgaa

SEQ ID NO: 395 - DNA, 107 bp, unknown
  Altogen  635822 strain
cggacatcctcacttaacgccccgttggtggtcggttggctttccggtatcgggcaactgctgactctcggacaaccagcgtagataatcgtcgggggtggcaaatc

SEQ ID NO: 396 - DNA, 107 bp, unknown
  Altogen  635822 strain
gcatcaaacatcggcttaagcggagtaaatagctcaccaatcggggcaaatgcctcggtaatgccgatgatcaccccgctaaagaaggcgctgatgggttcccaata

SEQ ID NO: 397 - DNA, 108 bp, unknown
  Altogen  635822 strain
tcagcatcatccagctcgatatccagttggtcagcctcaaagccgcgattatcaaccagggcaagtgacagcagacgcgggctgatgttctgcgtgatgtccttgccc

SEQ ID NO: 398 - DNA, 109 bp, unknown
  Altogen  635822 strain
gtggtcctggtggtgacatcatgaccgagacgaaatatcagcgcctgatcccgtcgtacaacaagcacaaacccaaattttacgaccacatttcgttaatcacccagcc

SEQ ID NO: 399 - DNA, 109 bp, unknown
  Altogen  635822 strain
aaaagtaaaaaaatatttcagccctgtagtcctctctagcggtactctgcctcaaggctcttagccatggtgctgcccggcttgctgctgagatacataatagtggctt

SEQ ID NO: 400 - DNA, 109 bp, unknown
  Altogen  635822 strain
ggagttgcagagttaatacccgtaaatgtgtttgcgatatcgtacgtgcccaaattcacattcacgtccggagtggtgcaggtttgtgtattgactgccagttgccctg

SEQ ID NO: 401 - DNA, 109 bp, unknown
  Altogen  635822 strain
ggtatggctaatcaaaggttcccacttcccgaagcggcacgggcttatccacgatgccggcctgctccctctcccctacacaagtgttcagggtgttctcggttggtac

SEQ ID NO: 402 - DNA, 110 bp, unknown
  Altogen  635822 strain
tccaccggcaccatgttgatgcgagtcaggaaatcggaggtctcctgcacggtagtcatcagggtttgcgtgaccgacggctccacgctgaacttgttgtaaacgtcacc

SEQ ID NO: 403 - DNA, 110 bp, unknown
  Altogen  635822 strain
ccggcggcagcaaccagcttgatcgcgcccttcatggcctcttcaccgaaaatgactttcaggtattccgcctgctgcgccgtaccgaggttatttttcttgaatgaggc

SEQ ID NO: 404 - DNA, 110 bp, unknown
  Altogen  635822 strain
tgttccgcctgagatccatccgtgcgctggcggcatttattgataataccgcgcagggtagccagatcatccaggcaccgtcgatcgcccggcctgaggaacagcggctg

SEQ ID NO: 405 - DNA, 110 bp, unknown
  Altogen  635822 strain
ggtgacgtttacaacaagttcagtgtggagccatccatcacgcaaaccctgatgaacaccgtgcaggagacatccgattttctgacccgcatcaacatggtgccggtgga

SEQ ID NO: 406 - DNA, 110 bp, unknown
  Altogen  635822 strain
cgttcgtcgtggatcgttggcgctgccgttgacgccaaacccgatgacatgacgaaaaaaggcacccgaatcaccagtgagattgacccaaaacgccgaggtattcttga

SEQ ID NO: 407 - DNA, 110 bp, unknown
  Altogen  635822 strain
cgttcgtcgtggatcgttggcgcggccgttgacgccaaacccgacgacatgaccaaaaaaggcaccaggatcaccagcgagattgatccaaaacgccgaggtattcttga

SEQ ID NO: 408 - DNA, 111 bp, unknown
  Altogen  635822 strain
gtgctgattgcggtcagtaatatggccgagtcctataagccaaagctggaggagggcagcgggcgcacgcaaaccctgcgcatggtgctgattgtcagccacaccgaggcc

SEQ ID NO: 409 - DNA, 112 bp, unknown
  Altogen  635822 strain
tgaacgggcagcaggccttgctgatgtcgtcctgctcactcgtcaaagcacgcagcacatcgatattccagacggcagtgtcgctgcttaacgactcccctgccccggccag

SEQ ID NO: 410 - DNA, 112 bp, unknown
  Altogen  635822 strain
acctgcgattactatcgcggcatgatggagcgtgagcgcctgaccatctgtttccatgctcaacttaaacagcgtcatgctgtgcttggtctggaagaaatgaacgaaggcg

SEQ ID NO: 411 - DNA, 112 bp, unknown
  Altogen  635822 strain
tgttccagattgttaaagagcaatatcttaaacacgactcgcaagagtcatctttaagataatcagtcacgaatgaccggtgataatgtctttcactcattatcggatggcg

SEQ ID NO: 412 - DNA, 113 bp, unknown
  Altogen  635822 strain
acgcattgcggaacttgaaacgcaactcgcagaggctacagccaatggcaagaaaccaaagcctaccgacgcctgaccaattccgcgagatgttccctcagttcaaagatacc

SEQ ID NO: 413 - DNA, 113 bp, unknown
  Altogen  635822 strain
ctgtacagagtggcaattaggtatagagtttaatctgttgcacgtttaattctcttactaagtgatgcgaaattacaagcagattgcaaaagtaaaacggtggcacgttcggt

SEQ ID NO: 414 - DNA, 114 bp, unknown
  Altogen  635822 strain
gccgccgtacatcacagctcaccgatttacgtgaagcgcaacatcttggccagcacctacatcccgcacccgctgctatcccagcaggattttagccgctttgcgcttgaccat

SEQ ID NO: 415 - DNA, 114 bp, unknown
  Altogen  635822 strain
aaaaaaaaccaagcctccatttatcgatgcattatagaacatgttacccccttggcaatccattcaaaatcaatgtaaataagcaataaaacccacttatctggtgtttttttt

SEQ ID NO: 416 - DNA, 114 bp, unknown
  Altogen  635822 strain
ggggcgttaagtgaggatgtccgacagcttgagcgcgccctggtgagttgcgcgcagcaggtcgaagccgtgaaacactgtcaggaggaattagatgctcaagccgaaaagcct

SEQ ID NO: 417 - DNA, 114 bp, unknown
  Altogen  635822 strain
atcattggcagcggctgggcgggccaggatgaaatacaaaacaatcatgaggactttttgcgtgcaggattgggttcaccctttgggtgtttcctgtccatgtcgaatgtcgcg

SEQ ID NO: 418 - DNA, 116 bp, unknown
  Altogen  635822 strain
cacccgatcagctttttccgtcctaccacagtcaacatttttgccgaagtgcagatcaaagcactgcagggttacacctctgcaatcggcgaggaaatccgggtagccatcgcgga

SEQ ID NO: 419 - DNA, 116 bp, unknown
  Altogen  635822 strain
aatctgtttatgtgcgaattcgtggacgataaagcctcggtgttcccatttgaggaattgcagggctgtatggtcgacagcctggaggaatggacggacgttaacccgtatgcggc

SEQ ID NO: 420 - DNA, 116 bp, unknown
  Altogen  635822 strain
cacccgatcagctttttccgtccgaccacagtcaacatttttgtcgaggtgcagatcaaagcgctacagggttacacgtcggccattggcgaagaaatccgggtagccatcgcgga

SEQ ID NO: 421 - DNA, 116 bp, unknown
  Altogen  635822 strain
aaagactttttcgcgaacctcaaggctcaggcatggtggctgctggctgacaggttcaggaacacctacaacgcgctgaaaaacggcgactcgttcaaggtcgatgagttaatcag

SEQ ID NO: 422 - DNA, 116 bp, unknown
  Altogen  635822 strain
tgatgtttctcggtaacgcgggaggtgcatattacgctttcccgctgaagagtcaacctttttctcttacgagacgcggtgttttcaccgggttgcttcttcctggctgggcgact

SEQ ID NO: 423 - DNA, 116 bp, unknown
  Altogen  635822 strain
accagcgaatcgcacggcaacacctttaactcgctgtttgccggggtgaatgccggggtgaacgtgggggcttggtatttgcgccacaacggctcttatagccagatgagtgacgg

SEQ ID NO: 424 - DNA, 117 bp, unknown
  Altogen  635822 strain
aatgacagtcataactactgaaaccgttcgaaatcagcccgtcgggttacgcggtcttatcggtaaacacttggccgagccgcgctggcgcgacacctgcgattactatcgcggcat

SEQ ID NO: 425 - DNA, 117 bp, unknown
  Altogen  635822 strain
atgccgcgatagtaatcgcaggtctcgcgccagcgcggcccggccaagtgtttaccgacaagaccgcgtaacccgacaggctgatttcgaacgatttcagtagttatgactgtcatt

SEQ ID NO: 426 - DNA, 118 bp, unknown
  Altogen  635822 strain
cccgctgagcctaccgcaaccccgcgcatatcagcagcataaagcgccatgtaatgcgcaacgaacaggccgacaacataagggaagatctcttcaccgaaccggctttcgctcagca

SEQ ID NO: 427 - DNA, 118 bp, unknown
  Altogen  635822 strain
tgagctaaaaactcaatctgatcctgtgttggataaaaccgatatttgtaggcgcgtttcatatgtacaaaattacaggagttatagtgaaaagacaaaaagaagttagcttgaaaac

SEQ ID NO: 428 - DNA, 119 bp, unknown
  Altogen  635822 strain
agcttagcgcacacgcgatggaactgtaaatatcacatagtatttgcgccgaagtaccgaagaaaggtgttctacggggaaaagcgtaaagcgattggcagtatcttaagaaagctgtg

SEQ ID NO: 429 - DNA, 119 bp, unknown
  Altogen  635822 strain
taatcgccatcgcgaagccctccaaggaagattttgctttcaggtatacagcagactgttacccgaaagttttgggatagataagctaggtgaacgtttaaccagtcttttggtcggag

SEQ ID NO: 430 - DNA, 119 bp, unknown
  Altogen  635822 strain
gttcgtgaacttctgtctgcttatgacttccctggtgatgacctgccggttgttcgtggttcagcgctgaaagcactggaaggcgaagctgagtgggaagctaaaatcatcgagctggc

SEQ ID NO: 431 - DNA, 121 bp, unknown
  Altogen  635822 strain
tcaagggtgtcaccctgctgtgcaatgaccgccatcagagctgcccgacgatacagcgcggtttaccctgcaaccgagccaccgcccagcgcatatcccgccaatgctcgtcaatcgacgc

SEQ ID NO: 432 - DNA, 121 bp, unknown
  Altogen  635822 strain
attgtctggtaatcaggcgcggtgatgccgctcgcggtcacagtggccgcaagcccaagcgtatcgagatttagcattatgcctcgctggttacagtcgtttcgccgtacagcgtgttgat

SEQ ID NO: 433 - DNA, 121 bp, unknown
  Altogen  635822 strain
gcgtcgattgacgagcattggcgagatatgcgctgggctgtagctcggttgcaggataaaccgcgctgcattgtcgggcagctctgatggaggtcatcgcacagcagggtgacacccttga

SEQ ID NO: 434 - DNA, 122 bp, unknown
  Altogen  635822 strain
gccccctcaagagcttgataccaggtgagtcactaatcaaaatagtgatgaatattttacttaatcacggcatcgaaggggttgaccgcaccatagtcattaacaacacttccactgatttt

SEQ ID NO: 435 - DNA, 122 bp, unknown
  Altogen  635822 strain
ttggtttccgctgagaaatccacggcggtgatcgtcttggctgtgccatcgatggtgattttcatcgagccatcggtgaccgtcgcccaggtgctgatcgccatctgcgccggtgtcaaaat

SEQ ID NO: 436 - DNA, 122 bp, unknown
  Altogen  635822 strain
gtgacgaacaaatcttttaaacccatatcaatgcccgtcatttttgcggtaacaggcagtgattttggttcaaattcgcacaagcatgacacgaaatatcgacctgatgcgtctttggaaat

SEQ ID NO: 437 - DNA, 122 bp, unknown
  Altogen  635822 strain
aaagcctggtttaccgtgctgggcgatccgagcaaacgctttgagggcgtgctgaaagacatccaacccaccccagagaaggtcaataacgccatcttttattacgcgcgtttcgaagtgcc

SEQ ID NO: 438 - DNA, 122 bp, unknown
  Altogen  635822 strain
accggattttgtgtccggctgcaggagctcaacaacagcgccaggcatatcgcgcttggcgcaatcatcatctttaatcgcatcgcggagtttcctttcgttggcggtggcctgctggcgca

SEQ ID NO: 439 - DNA, 123 bp, unknown
  Altogen  635822 strain
gccatcaaactggccggtgctgttcacttcgccgacgtgattattaacgtaaaccgataaggggcaaaaatgtctacttacagctttttagatgtttcggcctcgatcgtcgggccgggcggc

SEQ ID NO: 440 - DNA, 125 bp, unknown
  Altogen  635822 strain
aactcgcgtttggccaataccatcagctccacatagtccaggctgtccagcttcaactgctgcaggggcatctctggcgccagatcggccatctcgagatctttggcatcacaaatcatttccgt

SEQ ID NO: 441 - DNA, 125 bp, unknown
  Altogen  635822 strain
tatgacgtgatcgacctgcagattggccgttctgctggttcactggcaccggcaaatatcgttgtaggttttaacgaggcagcggcctgcagtgcgggtaatgtggtcctggtggtgacatcatg

SEQ ID NO: 442 - DNA, 125 bp, unknown
  Altogen  635822 strain
catgatgtcaccaccaggaccacgttgcccgcactgcaggccgcagcctcgttaaaccccacaatgatgtttgtcggtgccaatgaaccggcagaacggccgatctgcaggtcgatcacgtcata

SEQ ID NO: 443 - DNA, 126 bp, unknown
  Altogen  635822 strain
ctccgacacatccgggggcgggataatggccgtcggcacatcaaacggcgcaacggggttatgcataatcactgttgtcatgacgacctcaaaatagggggcggtggacgatggcgttgataagcc

SEQ ID NO: 444 - DNA, 128 bp, unknown
  Altogen  635822 strain
attcctccagatctctacgcatttcaccgctacacctggaattctacccccctctacaagactctagcttgccagtttcaaatgcagttcccaagttaagctcggggatttcacatctgacttaacaa

SEQ ID NO: 445 - DNA, 128 bp, unknown
  Altogen  635822 strain
tagtcataatcaataaacagtttcccgcctttcagcgactccttatcgttggcgctttcgtcataccagcaatccgcatcaatgatgtaaccattgcttttcagctcgcggaatttggccttgatgcc

SEQ ID NO: 446 - DNA, 131 bp, unknown
  Altogen  635822 strain
acgtgggatgcggcaaacagccgtttcatcatcacgtcaaaatctaccggcgcgtcgtcagccgtcggctacggttcggcgaacaccaccggaaccgacatttccgcgatgatgaaagcggggcagaatgc

SEQ ID NO: 447 - DNA, 131 bp, unknown
  Altogen  635822 strain
ctaaccaactgaactaccgctccaccgattcttttacgtcgcatctttcgatgctggcaaaaccaccttggtgatttcgcgcattaccaggtgtcatactgataacgtttaattgatgcctggcagtgtcc

SEQ ID NO: 448 - DNA, 134 bp, unknown
  Altogen  635822 strain
tctggaaaacttcttttgccaaatcgatgccaatagttttaacgttcatgatggccgttccgttcaattagtgacgatttatcgtcccactgtggcacaagagatgggaggcgaccattccattaacaaagccc

SEQ ID NO: 449 - DNA, 134 bp, unknown
  Altogen  635822 strain
ctcaacgatctgaatgaaacccaggcgatcaaactggccttcggcgaggcggcctacagcacgccgctttccagcaccaagtcttactccgggcatctgattgcggcggcaggcagctttgaatccatcatctg

SEQ ID NO: 450 - DNA, 134 bp, unknown
  Altogen  635822 strain
agctttttatgcgcatcgatcgccgcctcaatccaagacagcttgatcacagcgttatcgtcgtcagtgcgtggcagcccaagatagacatactcgaaggattcttcgtcacgcgccctggatgcctcgataac

SEQ ID NO: 451 - DNA, 134 bp, unknown
  Altogen  635822 strain
aaataccactgcaactaactgataataaataataaaattatcgaaatggatttttgtgttgttattttcttaagttcgatacatatagctattaacctgacgtcagtgtaaagagggccgtgatttatcgtacc

SEQ ID NO: 452 - DNA, 137 bp, unknown
  Altogen  635822 strain
atcaccagcgcatccaggttggcatagtcaccccccttaccgatgcggatggtattggaaatcaccttgccctcctcgtcggtgaccttgctcatcacgcgggttggcgcttcgtcgcggtacttttgcagccagcc

SEQ ID NO: 453 - DNA, 137 bp, unknown
  Altogen  635822 strain
atctgcaggtcgatcacgtcatagttcgcgctgtcggcagagccgtttaaattggccggcaagaaaagccgcgtgatgaaaaccgggtcaccaatgcggatcgcgttgatgtaatccgcgatggctacccggatttc

SEQ ID NO: 454 - DNA, 137 bp, unknown
  Altogen  635822 strain
atcaccagcgcatccaggttggcgtagtcaccccctttaccgatgcggatgacattggaaatcaccttcccctcctcgtcggtgacgttgttcatcacacgggttggcgcttcatcgcggtacttttgcagccagcc

SEQ ID NO: 455 - DNA, 137 bp, unknown
  Altogen  635822 strain
cggccaaactcaacaccggcgttcttgcaacgttcaagactctcctggctggacttcaccggctttaacaggtcggtgaaccactgccacgcctgcttgagccagccaccgagggcatcaaacatcggcttaagcgg

SEQ ID NO: 456 - DNA, 137 bp, unknown
  Altogen  635822 strain
cgtttcagtcggtcagcttccagaccgaccttctcagttgctaccaggcgataatcggtgtcggcgtaaatctttccgacggtggcaatcgttccggtaatcgactcgatgcgaaccgtattgcgcatcatggcttt

SEQ ID NO: 457 - DNA, 139 bp, unknown
  Altogen  635822 strain
agctatagccccatacagtcacttgcagaaacctttatttaccactcgctcaggcaaggcatgctcactggacgtttacggtgtaaacgtatcgcgtgcaacgcagcacaagtgcgaatttggtaggcctgagtggact

SEQ ID NO: 458 - DNA, 140 bp, unknown
  Altogen  635822 strain
aggcccatttcacgcagccagaagccgcccacgctggccggaataattaactcagcaatcagccggtcgggcgcagccttgtcaaccgtcaggctattgagtgctgcacggtaacgctcgttaatcagcttggtttgtgc

SEQ ID NO: 459 - DNA, 140 bp, unknown
  Altogen  635822 strain
cccccttttgatttcttgttgaacctttgcagttgccagaccgcaaactgttttaacaaatcaaaaggggtttttataactggctcaaagctgaaagctttacggaacctccagcctagctggaggttttctgtgcacaa

SEQ ID NO: 460 - DNA, 140 bp, unknown
  Altogen  635822 strain
gtggtgacaatgtcgtatacctcaggtttgccgagatctggcccaagggtcttgatgcgacgctctaagtttgggttaatcatccagcggtcgagaaccaccatccctttaaaactgcctttccctactttatccagcat

SEQ ID NO: 461 - DNA, 141 bp, unknown
  Altogen  635822 strain
aacactaccgcgcaaactaccgacagtttccgcaacatgaccaccaacaccacaaaatctatcgcggatatcaacaaggctgcgaaagaactctgggctaaacgaggctaaaacatggctaacaccatcctttaccggatg

SEQ ID NO: 462 - DNA, 143 bp, unknown
  Altogen  635822 strain
actcggccatctacagcgttgctgataaagttacttaaatacccaccccacactgaaccatgaacattcccgtcaatggccaatgcagttccattgttaaaattgagttgaggacttacgcctgagatagtgactgagccatc

SEQ ID NO: 463 - DNA, 143 bp, unknown
  Altogen  635822 strain
tccgtcaggcacgtaaacccggcggccatctgctgctcgcggtacagatacaactcggcattggtctccgcgataccactttggatcgcgcggcgcagtcgctgcggcgtgacggtatgctccaggcgcatcagctcacgcac

SEQ ID NO: 464 - DNA, 144 bp, unknown
  Altogen  635822 strain
ttttttgttttacggagatcgctatgacaaagccggatgagggaggcctcaagcgcgactactgtgctggtcaactttctctccgcgacatggcagagatatacggtatcagtgagggggcgataagaaagcgcgccaaaaaaa

SEQ ID NO: 465 - DNA, 145 bp, unknown
  Altogen  635822 strain
cgctttcgcttgctaactcgaggaggcgtatactacgcgattcccctgaagagtcaacctttatttcggtgttttcaccgggttggtcttcctggctgggtgacttggttctcgttagaggagtcgttgttcccggtcagtggag

SEQ ID NO: 466 - DNA, 146 bp, unknown
  Altogen  635822 strain
tgtgcctggctagcaatcggcggtgcataggcgtagtaaccggccgccagcgtgtcgcctgtggccaaattaccgaccggatcaccaccccagacgcccggcgcaatcagcccgttcgtcacgccttgctcgagcgaaccgttgac

SEQ ID NO: 467 - DNA, 146 bp, unknown
  Altogen  635822 strain
gtcaacggttcgctcgagcaaggtgtgacgaacgggcttatcgctccgggcgtgtggggtggtgacccggtcggtaatttggcaaccggtgatacgctagcagctggttactacgcctacgcgccgccgattgctagccaggcaca

SEQ ID NO: 468 - DNA, 147 bp, unknown
  Altogen  635822 strain
ctcgtcgcggtgcgcgtcagttgccgcagtgctgagtcctgcttttcaaacacttcaatgcgcacatcttcccaggctgaagtcaggttttttaaatccccgtcaaggttgtcggtctggattttcgcaatcctgtccgtcgtccct

SEQ ID NO: 469 - DNA, 147 bp, unknown
  Altogen  635822 strain
tttgaactaaagtgtaccgtccaattatttatgctgaaattttctggccatcagcattaaacttcaagcagtgaacaattaacgagcaaacatgaaacgttaagactatctacagtgccgagggggattttttagacctatcagtag

SEQ ID NO: 470 - DNA, 147 bp, unknown
  Altogen  635822 strain
agtggacaacgcgcttgcgcggtaatccttctcaccaccgtaactgtggccaaagagatggattagtcagcactaccagaaagattttgccaactttctgttcaaaattagcaaccatgaataccatggtggggttcccgagcggcc

SEQ ID NO: 471 - DNA, 149 bp, unknown
  Altogen  635822 strain
ggggagagcgagaagtgttttcactacttgagcgcggtctgcgccatggccaccgctgtcctgtacgagcgttaccgtaccgtcgatgccagtgccaagggcgataaaaaggccgatgacgttgaggcgtcgattgacgagcattggcg

SEQ ID NO: 472 - DNA, 150 bp, unknown
  Altogen  635822 strain
aatgatggtgcaaatatcacggcgtttggcactggctttcatgacgttgaaagtgatgttgctgaacactggtttgtgaaggcccactgttcgccggatggggaggcaccaacaacggagtcggatccacgcattgcggaacttgaaacg

SEQ ID NO: 473 - DNA, 155 bp, unknown
  Altogen  635822 strain
aacaccataaaggtagcctcttacccaccgaaaggcaaggacaaggaggctatcatgccgcaaaagttagtcgtaatggccctggttattctctgtatcaccgtactggtgtttacctggatgaccaggaaaagactctgtgagatccgcattcg

SEQ ID NO: 474 - DNA, 155 bp, unknown
  Altogen  635822 strain
accccaagagcccgcattttatgcgggctttattatgggtgcttatgttacattcagcaggttcacttaatgatgtaaacctctacacttcgtggcaccaagtcacattgttaatataaggatattgaataatggctaacgtaatctatgcgaca

SEQ ID NO: 475 - DNA, 156 bp, unknown
  Altogen  635822 strain
tgttccagattgttaaagagcaaaatacttcgcagcatactgttgccagtacactctgaagtattatcaaggaccgcatggatatggtggagctaagcgggatcgaaccgctgacctcctgcgtgcaaggcaggcgctctcccagctgagctatag

SEQ ID NO: 476 - DNA, 158 bp, unknown
  Altogen  635822 strain
cgactgattgcgcccggcgtgggttttgataaacagatgtcaggcacgcaagccattctcggcctggataaatcagacgaaaagcttcaggccattcgtcagcaggcgcgtgacattggtgcgacaacggccttctcgccgggggatgtggcacgcac

SEQ ID NO: 477 - DNA, 158 bp, unknown
  Altogen  635822 strain
tgaccggtaaaggtgataaatatgttccattgcaacttatgcggtactgctgcacatgctcgttctagtcgttacctgagcgagaataccaaggagcgttatcatcagtgtcagaacgtcaattgcggacatacgtttgtcaccatggagaccgttga

SEQ ID NO: 478 - DNA, 161 bp, unknown
  Altogen  635822 strain
gaaacggactgcgtttgtcgctggcgcaactctgcatctgattcgactggtcgccctggtgtagcggccgccgggttcgttacggtctgccagccctgcgtaggcgtgccgatcaccgtgatggtgcctaccggcgcaacgatagcgccatcaacctggca

SEQ ID NO: 479 - DNA, 161 bp, unknown
  Altogen  635822 strain
aatcctcctggatgcaccatattactaagtgtttgtctgagagtgtttagctcacagatgaatgcgacctgaaaggtagcacaaagggggataacgttgctttagcaacggccctgcgggcgaagcggttacgctgagtaatcctcctggatgcaccatat

SEQ ID NO: 480 - DNA, 162 bp, unknown
  Altogen  635822 strain
cctttcccctgattaattacgtgagagaatcccaatgaaaaaagcagataaagcagcagaaaacccgaacgtggtcaccctggatacgccggtcaagcgtggtgataccctgattgagtcggtaacgctgattaagcctaacgcgggcaccctgcgcggggt

SEQ ID NO: 481 - DNA, 163 bp, unknown
  Altogen  635822 strain
agtccactcaggcctaccaaattttcccttatactgcgttatatccacagtcgtttaccaaaagtaaacttcctgtgaatatgccttgtctaaggaaaaattaactcttcatagagttggtacccataaagatttctgtcagtgactgtatggggctatagct

SEQ ID NO: 482 - DNA, 164 bp, unknown
  Altogen  635822 strain
gcgatgggcggtaagccatttgaggcattggtcaagcaaatggatatggttcgacagttccagaccaatgaaggaatgtcactgttcgatgctgaagatacttttgaaacgcattcctattcgttcgccgggctgtccgatctgttgagtgaattcaaagagga

SEQ ID NO: 483 - DNA, 164 bp, unknown
  Altogen  635822 strain
gaagtgctgaaaacggaaaaagacagttcaaggcacccgatattccaggtgatgttcagtctccaatcgtttggcgcagcaggacgtaccgaaggagaaagcctgtttgagcagtatgacgcgcaagaaggggcgtatcgggcagcgaagttcgatttgaccgt

SEQ ID NO: 484 - DNA, 167 bp, unknown
  Altogen  635822 strain
ctggtgtagagcacgttatagaggttgttctgtacgtagttctgcaaccagtccaggccgtggcgctcatcgaagaaatcgccgttgcacatcaggccttcctgaataatcgccgtgtcgttgtcgtagttgacgaacacgttgcagtttttcgcggtcagggtgtt

SEQ ID NO: 485 - DNA, 168 bp, unknown
  Altogen  635822 strain
cccgcctgccgacaggctttgtgcttcgacgttcatgttggaatccccccagtgtccagccagtgtaagctggacgccaaagcagtcttgtgtatagccacgcggaaagccgacccacgttaaataacccgccccccgatcgacaacgccgccctggaaaataaagcc

SEQ ID NO: 486 - DNA, 169 bp, unknown
  Altogen  635822 strain
gtgcctgctcggcaaacagctgttccacgtcgcccttcatcacgcccagctcaaccaatccggcgatcatgatgcgaacgacctgatcgttcacttcgcgaatgctgatacccggtttaaacatttccagcgccttgttgatcgacgccagcacgatgtcatatacctc

SEQ ID NO: 487 - DNA, 170 bp, unknown
  Altogen  635822 strain
cagccactaatgggggagagcgcaatgatgaatagttgttcagaaatcaacttaacttattgatattgaacattgtttaaaaattaggaatgttgccacaacaaatttgttgactcgcaaaaagataatccttagagtgcgtgacagtttagttcaaagtgtaccgggtg

SEQ ID NO: 488 - DNA, 171 bp, unknown
  Altogen  635822 strain
aacaagcctcatcattaatacgccagtagggttgactaaattcagcctcggttaacccagcatgcataaataacgtgcggcgctgactaacagtcaaacgagcaataaaatcagagtcactaatacggtgccgacgatgtttagcgaacgcagtgcgcaattcaccaatag

SEQ ID NO: 489 - DNA, 173 bp, unknown
  Altogen  635822 strain
ggtgacggcctgcgccgtcagtagcgccttgatgccggtatattgaccggtcgcatttgcgccgccgatgatattagacgtggtctcggccgcatctttgccctcggcgacgcgcacgacaacggtgaccggtttgcactggtcagcaatggcttgcaacgcagcggccagcg

SEQ ID NO: 490 - DNA, 173 bp, unknown
  Altogen  635822 strain
ccagccgctatgccaaaagcatgatccgcgaggtgcgtactcacgatccggccactctgatcgataaactgatctgcggcgcgtatatcgaggcccgctcctgcgaacgcttcgccaagctggccccgttcctggacgatgagctgaaccgattttatgtttcgctactgcgt

SEQ ID NO: 491 - DNA, 176 bp, unknown
  Altogen  635822 strain
agcgtcagcggcaagctgatgaagcttgccacctccccggccaaatacacccggcgcggcgtggagcgtggtgtttattggtttgtgcaatcctttaccgagccgcacagctttgccccggacagtgtttttcacctgctggagccggatattaaccaggagctttatgggatgcc

SEQ ID NO: 492 - DNA, 180 bp, unknown
  Altogen  635822 strain
cggtttgggcttgagcgcactctcgcaccgttggatctctttttttaccccggcggccttgtcctttcgcatggcgatgttgagatgttccaacgcctgcgcgaagtcacccgcctcactcaacatcaggccgataaccttgtgcagcttggcgcgcacctcttcgggcatgtccgcatc

SEQ ID NO: 493 - DNA, 181 bp, unknown
  Altogen  635822 strain
gaccgtagccgttggccgcccgggccatggctgcgatccaggtttcgagtgatgcaggttgtgacataagcgctcctggcaaaataattcagactacagcgacggcaggttgtcgccgatggctcgttggcgctcgatacccaacatatccaataaattgtcgaccgcagaggcgtagcgc

SEQ ID NO: 494 - DNA, 182 bp, unknown
  Altogen  635822 strain
aaactgaaatacctcaacctgtttaacgacggcttgagctacatgggtattgtcagctcggtgaccttgccgaaactgacccgcaagctggagaactatcgcggcggcggcatgaacggcagcgccccggtggattttggcctggacgatgaggcgctaaacgtggaatgggccatcggcgg

SEQ ID NO: 495 - DNA, 184 bp, unknown
  Altogen  635822 strain
cagccgttcgttgccagcaccttgctgggtgccaccacgctggaacagttgaagatgaatatcgacagttttgacgtggtgctgaacgaggaggtgttgcaggccctggaggagatccacagccgcttcaccattccggcgccataaatgcccctcaccctgaccctctcccacagggagaggg

SEQ ID NO: 496 - DNA, 191 bp, unknown
  Altogen  635822 strain
tgcgacctggagaacgtcgagacaggcgaacgcttcgacctgattgataaggtcatggcgagcatttctaaccctgaaatccgacgcatggagctgatgagcaccattgcggggattgaaaagtatgccgccagcgagaggcatgtcggcatgtttatcacccttaccacgccgtccaaataccacccgac

SEQ ID NO: 497 - DNA, 191 bp, unknown
  Altogen  635822 strain
gtcgggtggtatttggacggcgtagtgatggtgataaacataccgacatgcttctcgctagccgcgtatttctctatgcccgcaatggtgctcatcaattccatgcggcgtatttcagggttagaaatactcgccatcactttatcaatcaggtcgaagcgctcgccggtctcgacgttctccaggtcgca

SEQ ID NO: 498 - DNA, 193 bp, unknown
  Altogen  635822 strain
cgcgggtcaaacggcccaccagcttgatcgccagaatgctgttgccccccaggcgatagaagtcgtccagcacgctgaggctgtcctgcgggagggcgagcagctcggcgaagacctcggccagttgctgctcggtcgccgtcgctggtgctacccgatctgcctgcgcctcaaacgtcgggaccggcaaggc

SEQ ID NO: 499 - DNA, 193 bp, unknown
  Altogen  635822 strain
gaggcaaggataaggaggcatgatgccaaacagaggagatatcgtaaaactggtcattatctgtaccacggttatcttgttggtatggataacgcgcagcaaactttgcgagctgcgtattcgatcgggcaacacggaggttgcggccattttggcctacgaatccgaacggtaaggcaacccaacggcgggg

SEQ ID NO: 500 - DNA, 193 bp, unknown
  Altogen  635822 strain
gcacagcggattgctaccacgctgatcgacaagttcggcaaacagcatatccaatgggccatcgtgctgaccggttttaccgtcggttttgctctgttctacgaagtgggcttcgtgctgttactgcctttggtgtttaccattgcagcctctgcacgtatcccgttgctgtatgtcggtgtacctatggctg

SEQ ID NO: 501 - DNA, 197 bp, unknown
  Altogen  635822 strain
cgctccaacatatcgacaccgttcacgcgctcaatcatgttgatggtgtcgatttcgatacgctctttgccgtcaatggtcagcttgtaataggtgcattgggtggtgattttggtctcggtatcctcaccctgtttctgctcgccaaaatccatttctttatggcgaccacgcagcacaatctcgacggccaccac

SEQ ID NO: 502 - DNA, 197 bp, unknown
  Altogen  635822 strain
ccaagccagccgacccttcaagcacatccagacagcgagcaggtcgctgtctgcgaacatccgcaccacgcagcaagacctcaaaaagctgaatgcacaagccagacgtattgagggttttcgcgagtcgagtgcgcagcttgcggtcaccggtcgagcactgcaaaaagccaagcaggacgccaacgcactggcgg

SEQ ID NO: 503 - DNA, 198 bp, unknown
  Altogen  635822 strain
gggacagcgcccctggcaaccggctggcgttttttggtgacaggcacttcgagtacgatcgctttggtaacctggcggtagagcggcgcggcaaagcccacaaattggtgaccacctttgcctatgactgtcggcaccggttgataaagcggaccgatccgcacgggcaagtaaccacctacacctatgatgcgttta

SEQ ID NO: 504 - DNA, 199 bp, unknown
  Altogen  635822 strain
tagccgtgaccggtttatccaccgcccacatatgcgcctcggccatggtgtcggccagcacttgcgcggtacgggtgtagttttcaaacaggaaaagcgggtcatcagaacaggtgcggttaccccagaaacgaaagccgtctttgcggataagggtggtgacccctgcctgattgagcaggtcggcatcggtgccggg

SEQ ID NO: 505 - DNA, 200 bp, unknown
  Altogen  635822 strain
acgccgtccaaataccacccgacgcgcgtcgtcggtaagaaagacaatccccaggttcagtttaaccacaattgggatgtagaggcattttcccctaaagacggtcagcgctaccttgtgggtatctggagcaagatgcgcaccgcgtttaaagaccgtgacctgaatgtctacggtatgcgcgttgttgagccgcacca

SEQ ID NO: 506 - DNA, 202 bp, unknown
  Altogen  635822 strain
tcctgcacgacccaccaattcttaatgggttggtaaagctggaatcgtgaggatgagaaccgttaaaggttcgtagcgagcgaagcgagacaacggcaatagccgttaatcctgctagaaccaccattatgtgcagtcgagtccttcctcgttgctctcgtattaagaagtaaaccacgtcagtgggtcgttagctcagttg

SEQ ID NO: 507 - DNA, 205 bp, unknown
  Altogen  635822 strain
ccgaattcggcacgctaacctttcccgctggcttttcgattgatgacctgatggcagatattgcggtgattttccactggccgccgtcagagctttacccgatgagcctgtcggagcttttcaactggcgcgataaagcgctccaacgaagcggacacgcgaatgagtaacaacgtcaagttgcaagtgctactcaaagccgttg

SEQ ID NO: 508 - DNA, 209 bp, unknown
  Altogen  635822 strain
gcaatcagcccgagtccggcctgcgtgaccatttcggtgttgtcgagggagggtaacggcacggccagtgctgacctgttggccgtggtggccagcgccctgaatgatgaaaacgtgcgcccggtgggtgaccgtgtgacggtgcaatccgcgaccatcgtcaagtatgtcattgaggcggtgctctatctctacccaggcccggaagc

SEQ ID NO: 509 - DNA, 210 bp, unknown
  Altogen  635822 strain
gaaaagccaccgcggtaccgctgtttccttgccagagttggatccctacaccagtggctgcacttcccgtggtcgaggaactgacggccataatggcattggtggcatttattaccgtattgttcggtgccagaatcaacccgaattggttgtttttcgcgacccctgcggtgaaagtcgaagtgttacgagaataagatccagcattac

SEQ ID NO: 510 - DNA, 211 bp, unknown
  Altogen  635822 strain
ccagccgataccgtgttgctggcaaaccactaacgggatcaccagcaccaccactatgtggcacagtttgctggcaataaacaccgcccagcccttgcgcccggccagtacaccctcggtggccaacggggttttgcccaaccggtctgaccaatcaaacaccagcgcaatatagggcagcgacaaggcagcaatcagcggccagtaaagg

SEQ ID NO: 511 - DNA, 211 bp, unknown
  Altogen  635822 strain
ccggtcatttagaccaaatcctgattaatagcctgaactatgcgatgagcagggaacagcatgtaagccatcaccctgtcgtgtttaccaaacctatcgataaatcctcacctttgctgggcgtggctatttccagcaatgaatcgcttgaagtcctgtttgagttctacagaaccaatgcgtcaggtgcgcaagagctttacttcaccat

SEQ ID NO: 512 - DNA, 215 bp, unknown
  Altogen  635822 strain
ctggtagaagggttcaagcatgagcagatcagcaaaattgttctttatcgtgaggaggtcggtaaaccgcttgcagatatgttggatcagcacgtcattgccgtggccagcgacaaaaagattgaaggcattgcgcctttgttagatatcaatcagcctgaaacgatcgctgggtttatcgttcagtggctgaagcagacaaaggtatagtcccc

SEQ ID NO: 513 - DNA, 218 bp, unknown
  Altogen  635822 strain
cccctgttacagccgtgaaagggcagtgtcctaggcctctagacgatggggacccgaaatttgcttatcgaatcactgattcgataatttcgggtaaaggtgagatttttcgtgaaaaatcgagcgccattgtcgtttgtcactgtacttgacagtcacaaactttccggcacttacctataccacaaggttttgtttgctcattacttttcatcaga

SEQ ID NO: 514 - DNA, 220 bp, unknown
  Altogen  635822 strain
aatgctgtgttattgccgacatatactcgccatatttatagagttatgtattgcacaaatatatctaccctccgtgggtaacctaatagtttaatgacgcaaggtaaataggaataaacatgaaaaacttaacaatcgtagcttccctggttgcagtatttggttctgtgggtctggctcaggccgcttctaccggtaccatcacctttaacggtgaact

SEQ ID NO: 515 - DNA, 229 bp, unknown
  Altogen  635822 strain
cgcgtcatggtggaaaccaaaaaggacctgaaaaagcgcgatgttccatcacctaacatcgcggatgctttcgtcatggcatttgctccaacagataccgccatggacatttggaacattctcgggagtcagtaatgtcacgtaaacaaaaggtcgcaacggctgactcttacgataactttgtcgccagggtcggtttgcaacagccaaaccagcatgcggcatcaac

SEQ ID NO: 516 - DNA, 236 bp, unknown
  Altogen  635822 strain
ctttaaacatacaaggggactgaatgtgctacaaattaacgtcagtaacaggcctcggcaccgcaataactccatctcgcatagggcaactgataggctccagcacctgactacagcgccgttattaccctttgggagagtcaccaagcatgccgcagacagactcctgcccctgaccacaacgctattgcagccccctctccccgtgggggggataccgtcttgtcggttatccg

SEQ ID NO: 517 - DNA, 237 bp, unknown
  Altogen  635822 strain
gttgccatagatcagtttttcccgtcctcaaaacgctgtagctgttgcggcttcaccatggaaaaaatgcctcttgatgttcgtcactggcactgccctgagtgcggagctgaccatgatcgagatatcaacgcggcgcgtaatatcaaagctgccgggctggcagtgttagcccacggagagcctgtaaatcctgaatcgcagcacgcggcttaggttcggctctgtgaagtggga

SEQ ID NO: 518 - DNA, 242 bp, unknown
  Altogen  635822 strain
tctgggaatacctgatgatattcggtgccggggcaattcaactgggaacgccataatgggcataaaaagcgggctcaaggtcagaggcgataatgccgctgcggtattggaggcattaaaagcactgaccaaaaaagaggtgctggtgggtatcccgtccgaccgtgcagaacgcggcgaaggtgacgcgttaaacaatgccgaactgggctacatccaatcgtatggcggcaccatccagg

SEQ ID NO: 519 - DNA, 245 bp, unknown
  Altogen  635822 strain
tcaggctatgacgccgattccgtgctggccgcgacaggctcaacggtaaacctcagtctggccgctgacgtggatatcgcgcaggcggcggacatcatcaccaacatgcagtcagccttcaaccttgccaatgcggacatcgagcgtattgctgacgtgatgaccaaagggtttacctcgtcaaacaccaaccttgtcgagctgggtgaggcgatgaaatacgccgcgccgattgccgaggccgc

SEQ ID NO: 520 - DNA, 246 bp, unknown
  Altogen  635822 strain
ctttatgtattcttgtatcctggctgtatttttaccaaccgtatcaacgtaataccctcggcaccagaactccctgttacggtatttgaacttcaaatcgccaaactgctcataaagcatcaggctactctttcccttcaggtatcccataaagcccgacacactcatcttgggcgggatttccagaagcatatggatgtgatccacacaacattccgcttccagaatattcacgtttttccattc

SEQ ID NO: 521 - DNA, 248 bp, unknown
  Altogen  635822 strain
gtgggcgcgcgcttaacgccgttgaacccggccatgatgaaatccaacgcctgacgcttcacgatggcgttacggatacgcaactggaaatcctgatagcgcgcccagaggtcgagctgcttatagcgcaggtggaagtcaaagttcatttgctgacactcgtagccctttgactccagcgcggtgaaatcagcggtctgacgctctttgccaccgtcggtgtcggtggtgctggcaatggagccatt

SEQ ID NO: 522 - DNA, 248 bp, unknown
  Altogen  635822 strain
atccaactgatgaagtcgctaccgctggaagccgccgaccgcgttaaggacattcaggaccgcgcaatccaggcggtaatcagtggcgaacgtcccgatcagctttacgaaatgatcatgcagtccggggaggtggccgccagccgtgcgcagcttatcgcacgcacagagatagggcgggccactggggcgctgaccgaggcccgagcgctgtccgttggctcagagggctattggtggcgcatcga

SEQ ID NO: 523 - DNA, 254 bp, unknown
  Altogen  635822 strain
ctttaatcaagaacaacgcttcacacttcctaccagcgggattaataccctcagtgttcccttggtcgcacggtatatccagaccagccaacaggtaacacctgggcgtgctgatgggaaagtgacatttactattaattattattgatagcttcaatatcgtcatgggatgaaatgcacggaaatgagctaagtttgcgcactgacggtatcaccagtgcatgccagataggattacacctaagtctaaatac

SEQ ID NO: 524 - DNA, 255 bp, unknown
  Altogen  635822 strain
ccccgccggtatttccttcggcggcgtaatgcggcactgttcggcattgttccagtgcaccgtcatggtctcacccggcttgataccgctgaggtagacgttgcccgcatcattcaccatgccggtttcctgttgcttggcattcagcaccgtggcaccgaaaggcggcaccgaaccatcggccagacgtattaccgccatcgccttctcacccgcgacgacttcaaagtgacgatagccaatagccccttcggt

SEQ ID NO: 525 - DNA, 257 bp, unknown
  Altogen  635822 strain
ggcgtccccgccttgcggcagcgctcggcggacagcgcaacatcctcaaccagcaaatagggggccgggcgcttgttgttcggggtagcaagccggtgttgcagcgcatagggcgcaatcaccagcgcgccagggatatcgtcggcgtcgagccgccactgcatgacggtcatcaggatgtcatcctgtacgccacgcccttcggccagcacgcccgccacccagggtgcataggcaggcaacatggcccgcttgtg

SEQ ID NO: 526 - DNA, 265 bp, unknown
  Altogen  635822 strain
ccccatccggcatcggatatcgctttcgacagtttgggattacggagcatgtttttcactttcagggattcaacgcaaacaacttggttctcgtttatcagtttgcgggacaacttatgcaggctgtccattcggcaatcagcaattttagcgtggagctttgcgacttttaatcttgctttagcacggttccttgaaccttttttcttcttgctcaatcggcgctgtaacaacgctaaacgtttcgcgtacttcgccgtgtggc

SEQ ID NO: 527 - DNA, 266 bp, unknown
  Altogen  635822 strain
ttttcccatgctcaccgcaagcttaaaggccagagcccatggacgctggaacaaatcaacagcgtggcactggccctgggagaaacgccggcgtccatcgtcgacattctccccgaaagcgagcctgttgggtccactgtggcacaggatgccatcttttctgtggccggggtggcgttaccttgtgtggcgcacattagcagcgaactattgggcagcaggcaggccgagtttgttggcttgcagcaggaagggcagtggatcgt

SEQ ID NO: 528 - DNA, 270 bp, unknown
  Altogen  635822 strain
catggcccgagaggcctcaatgacttctatgcagacatcgaaaccgacactcaacccggcgctgcgtccgttctggacgacaaaggcgaggaataaaatcctttatggtgggcgttcttccagtaagtcatgggacgcagctggcttcgccgtttttctggcagacaattacccactgcgtttcctctgcacgcgccagatccagaacaaaatcgaggaatcggtttatgcactgctgaaaatccagatcaaccgctttggcctgcgcca

SEQ ID NO: 529 - DNA, 279 bp, unknown
  Altogen  635822 strain
gacaccgtgagtatttctaacgttgaggatacatctgcaattggtggcagccaggtattggtgtccacttcatcaacatacggcagacctgcatacttgacagacatgcggaatatagttgtgaatggaattaaatctaattattcacagataccgttaactattagtggtccattaattaacgcaagatttaactttattcaacaggctaaagcaggtggaagcctttacgtgaaaagttccgcattcccatatttcaatgtttcaattactaacgca

SEQ ID NO: 530 - DNA, 281 bp, unknown
  Altogen  635822 strain
actgataaattaataatgtcagccgtgagctttaattcatccgagtaaatggcaatggtcgggtaaaatgcctgacccgtttctttatcttctttcacatcgctgaggataaagcacccggtgcgcattttagtaattgcataccagcccttaataacgacgcgattggccggacattgagcagtgcggatttgcttatccatgttgccccgccttctgcgcgagcgcctcgtgattgaacttctcggactcaacgcggagcagttcgataatctcaacgc

SEQ ID NO: 531 - DNA, 283 bp, unknown
  Altogen  635822 strain
cgctggcgaactgatgcgtaccgcgaacgacaggagaagatcggctacattcaggccaatgcccgactaaccgccctaaaaaaagagcctgaatttacctggctgaatgatgtttcctgcgtcccgttacagcagactcttcgccaccaacagaccgccttttctaacttctttgcggggcgtgccaggtacccaacattcaaaagcaaacaccacaaacaatctgctgaatttacggcgagtgcctttaaataccgtaacggcaagctgtacatggctaaaa

SEQ ID NO: 532 - DNA, 284 bp, unknown
  Altogen  635822 strain
gcgaaaatcttggttttcccgtccgggaatattttctgatagatgtcgctgagcgtttccgtcgtgccgtcccagtggttagcggcgattttggcgcggataatggttcggtacgtgtcatcgtccagtacagtaaagccgcccgcctcataacggccacgccagaggcccgcaccaaagcccaaggcgtcatcatccaaggagaagtaaacgccggtgatcggcgtcgctatcgtgcgtcctatgccaacccagaggcctacggcgtcgagctgcacgccgat

SEQ ID NO: 533 - DNA, 284 bp, unknown
  Altogen  635822 strain
gcgaaaatcttggttttcccgtcggggaatattttttgataaatgtcgctgagggtttcggttgtgccatcccagtgattcgccgcaatcttggcgcggattatggtgcggtaggtttcatcatccagcacagtgaagccgcccgcctcgtaccggccacgccagagccccgcatcaaagcccagcgcggcatcatccagggaaaagtaaacaccagtgatcggcgtcgctatcgttcggccgatgccaacccataggccgacggcgtcgagctgcacgccgat

SEQ ID NO: 534 - DNA, 286 bp, unknown
  Altogen  635822 strain
tctggttgcgtacggtcaggctcacagacttctcattccccgggaataccacgcgggtccgatccagcgaaatggccgcctgcgcagacggagccaatgtggttaatgcggctcctgccaacaggctcatcacaaaaaatcttttcatcatcattacctatattcttcctatcggacgtcatctcggcaggctcaaaagcctgcggacgatgacgcccttgactgttcaatgggtttacttcgctgccgttatccctttacacaaggcaacagcagattggcggtc

SEQ ID NO: 535 - DNA, 287 bp, unknown
  Altogen  635822 strain
gctcgtggtatcaccatcaacacttctcacgttgaatatgacaccccgactcgtcactacgcgcacgttgactgcccagggcacgccgactacgtgaaaaacatgatcaccggtgctgctcagatggacggcgctatcctggttgtagctgcgactgacggccctatgcctcagactcgtgagcacatcctgctgggtcgtcaggttggcgttccttacatcatcgtattcatgaacaaatgcgacatggttgatgatgaagagctgctggaactggtagaaatgga

SEQ ID NO: 536 - DNA, 314 bp, unknown
  Altogen  635822 strain
ctgggctggacgattgtagaactggccgctgcggcacaggttggccgtcctatcgatacccagaaatacgatggcatgcagttgaaatggaacatggatactgacgagcaggtgtatatcggggatgcggtaaaaggcgccaaggggcttttgaacctatcgcagataacacctactaacgcggctaaaccctgggctacttcaacccccgatgaaatccgcgcatgtatcaaccaggtgctgagtaatgcgtggacacgctctgcatattcgaaagtgccggaagacctattgatcccgccagaacagtattc

SEQ ID NO: 537 - DNA, 314 bp, unknown
  Altogen  635822 strain
tactggccatcggaatacgtcgaccgaaatcaggcggtggcgaggcagaggcttacgggaagtaatgcgtactggaaacggcacacggcttacaaccgacgttcggtggccgaaacggccatgtatcgggtcaaacaactgttcggtgggcatctaacgctgcgagactacgatgcgcaagttggagacgctatggccatgatccgagcgttaaacaaaatgacgcgtgcagggatgcccgaaagtgtaagagttgcctgaggaaatgaataatgaggtgctattttatcaaaatctgatttattcaacaaagc

SEQ ID NO: 538 - DNA, 322 bp, unknown
  Altogen  635822 strain
aatgatttcaacccttccagaccgtaaagcgtgaaccaattaacccagcgccccaacgatgaccgcgcgcagcaaagcgttttggcaacatcgctaaccgtgtcaccacggtgaagcatcagcatagctgtgagtctgcgagcatggttcttatcgtctgttttattgatggttttttgcatcagagacctttcggcatcggatattggtgctatgatcggcataactcagtccggttggtggtttgggatattcagcgattgatcagatcgcttaaatcggactgagttccctcttggtgatctactatttggaacagcta

SEQ ID NO: 539 - DNA, 322 bp, unknown
  Altogen  635822 strain
ttggggctattttgttgcaccctataaaaaaacggtaaatacatcaatatcgaattaattgactattttttattatttaaactttaaaataagaaattaaatgctttgccattactagggagatgtgtttttaggtgtttttgatttttgcaacagcgggctggcgcaatggccaaaatttagggggaggagagagcgatttgcggaggtaaaaatataactttatttttcagttagatagatctcgatcaaggaatattctaatacagggcattgcaaattcttatctttcgtttaagaattaggaacagtttagccccaa

SEQ ID NO: 540 - DNA, 333 bp, unknown
  Altogen  635822 strain
ggcaatgcctgataagcgctattgctcaaaacgttggcgttcgccgctgtgccgaacggcagaaactcattcttagccatttgatgcccctaatggtatgccccatgcgcccgtatcaagccccgatataaattcgttttgaatatcgaagccgaagatcgggccggaggcagttgtgatggtgtaattttttatgcggactgttgacggtttgatatccagatagcccatttcgatgacagctttcatcaccggcgtaatgctgttcccggtgatatagacggacatcgtcatatcgaagttatcaaccgcgaaaatcttggttttcccgtc

SEQ ID NO: 541 - DNA, 336 bp, unknown
  Altogen  635822 strain
accaaactctctgctctaatcaccctgctcgtcgcattggctatgttcttgatgctgatggggtgttcatacagtttcttttacgtgactcaggaacgcctcgagcgccgttttgaagccctggccacttccatcgatcaggcaatgctgctccaacctctgcaggctcaggataactggctgcccttggtgatgcggccgctaggtatcgttgcgattcatgtcgataccgaaaccagcaaccttttctcgtacagcctgccgaccatcaaagccccctgggcatcgctggctggctaccgccaaacctcgttaaacatgatgcatcaccccggc

SEQ ID NO: 542 - DNA, 338 bp, unknown
  Altogen  635822 strain
cttttggcggagtttgggggtatcccccctatcaatatcattgccgaagagaaacaattgcaacctagcctatgtcggttagtgtataaccagaaggttgatgttttcattcttggcttgcagagtaacattaataatgcgagtgagcttctcaattttcttattaagacactgccgtcattttttcctaaagccaaggtgattattatgacacagcttaacagcttggggaaattaaaggggtatttgttagggctgaacaatgtcagcgccgtgctggataatgggataacattgcaggaaatgcgtctgtgtttgacggagatcctgacgttacc

SEQ ID NO: 543 - DNA, 349 bp, unknown
  Altogen  635822 strain
ccagccagttgaatggcgcgacccaaaccgcaggtgaaacaggcttcgtgatggcactgaacaactgttcaggcacactgcagactgcctcagccttctttgaagcgggtgcttcggtagattccgtgactgggcgtctgaaaaacctgactggcacggcttccaacgtcagtctgcaactgctggacgcgtccagctcgtctcgggcagtgatcgaggccggtaacgcgaaccaggtgaccaacaccacttatcaagatgttaccagcggtagcgctaccctgccttatgcagtgcgttattatgctgaaggagccactactgctggcaccgtgatcagcaatgtagt

SEQ ID NO: 544 - DNA, 365 bp, unknown
  Altogen  635822 strain
ggcgccaatacatagattctcttcttcattgcaactcctcagaaagcagccccaattaaggggctgttggcttaaatgccgtccatgtagttcagggtttccgggtaaaccggttcaatcacacccaacttgccgtagtaggtcacaagctgataaagcccacggtactgaatcggcacgctttgcagaggaaccattgggaagcgaacgaactttttagtgtttgtatatgccagcatccggtctttgctcgcaacaccacgaccgatagcccatttaaccgggcgaatattcagcggcttaccattctgatgataagcaatagtgttggtttccagataagtcagcagtgactggttaccagc

SEQ ID NO: 545 - DNA, 373 bp, unknown
  Altogen  635822 strain
ccaatctagcctgtgaggctggcgctgtaaatcacctttagatcccataatcaccatcggcaaatattcagctctctaccaaggccgcctataatgagctaagtaacggccaaacttagactttggcacctgacaaattttgcaaaaggataagtaatgtctggagcttcccatgtccatcagcctaaagacggcaacagtaagcgcctactagccgcatttttagtcaccacccttttcatggttgtcgagaccgtgggcggattactttctggctcactggcgctgctggcagacgccgggcatatgctgacggattccgcagccctgctcgtcgcgctgatggcagtgcacttctcacagcgaaaaccca

SEQ ID NO: 546 - DNA, 390 bp, unknown
  Altogen  635822 strain
gggcgaaaacccggttgtggcccccctggtcgctcaggacgagccggagatcctggaagaggacgaggcgggccgccaggcgctgcttaaccgggtcgtggagttttaccatcacaccctgctcaatgccccggaggcggtggcctatctggagaaacgtcgcctcaatcatcctgagttagtcgcgcagttccggctgggcttcgccaaccggacgttggcctaccgtctgccgatcaagcaggtgcaggccggggcgaagatccgcgcccggctcaaggatgcggggatcatgcgtgacaccggtcacgagcactttaccggatcgttagtggtgccggtggtcgatctcaatggtcagatccgtgagatgtacggacgtaaaatcac

SEQ ID NO: 547 - DNA, 488 bp, unknown
  Altogen  635822 strain
gtcaaaatcaataatgtcggcccctcaccggtactgcttcagagctggatagataatggcgatcccaatgccaaacctgctgctatcaaagttccctttgtactgactccgccgatgaaccgggtggagcagggtaaaggccagacactacgtatcagctatgctggtggaagcttgccaatggataaggaatcggtgttctggctgaatgtgctggaagttccggccaaaagcgaagccaaaacgagcgaaaaccgtctgcaaatggctttccgtacccggataaagctgttctatcgccctgcgggcctgcaaggtaatgccaatgatgcttataaaaccgtcacctggaatacgcaaggcggcaaagtacaggcaaccaatcctacgccgttttatgtcaattttgtgaacctgtcagtcaacggcaaaaaactcgacaacgccatggtggcaccgcgctcaagcatggtgttgaatctggctgg

SEQ ID NO: 548 - DNA, 491 bp, unknown
  Altogen  635822 strain
caaatcctccaatgcgccgatctccaaatggattgcgcgtgagctacgcgataacgttacccatctttacctgcattgcgtgggcatccgcgtcagcgatcagttggaaaaactgctgtggcgcaaggtgccgcacgtggtgatcacctcggcaacgttacgttcattgaatagcttttcacggctgcaagagatgagcgggctgagcgaaaaggcgggcgatcgcttcgaaacgctgtcttcgccgtttaatcacgtcgaacagggtaaaatcgtcattcccaagatgcgttttgaaccggcgatggccaacgaggccgagcatctggaagagatggcgcgctttttccgtggcgagcaggctagcggtcagcataaagggatgctgatcctgttcagcagccaccgtgcgatgcagaccttcctcagctatgtcaccgatctgcgtctgatgttgctggtgcaaggcgatcagccgcgttaccggctgg

SEQ ID NO: 549 - DNA, 522 bp, unknown
  Altogen  635822 strain
gtacggccgccttcacggattgcgaaacgcaagccttggtccatagcgattgggtggatcagggtaacaaccatgttcacgttatcgcctggcattaccatctctacgccttctggcagttcgatggtaccggtcacgtcagtggtacggaagtagaactgtggacggtagcctttgaagaatggagtatgacgaccaccttcttctttgctcaggatatacacttctgaatcgaactgagtgtgtggcttgatggaacctggtttagccagtacctgaccacgttcgatgtcttcacgcttgataccacgcagcagaacaccaacgttctcaccagcacggccttcgtccagcagtttgcggaacatttcaacgccagtacaggtagacttaacggtgtctttgataccaacgatttcaacttcttcgccaactttaacgataccgcgctcaacacgaccggtaactacggtaccacgaccggagatggagaatacgtcttcgattggcagcaggaacggc

SEQ ID NO: 550 - DNA, 551 bp, unknown
  Altogen  635822 strain
gatcacaggagtcgcacttgacagataactaactgtaaaacatatagatttaattactttagttttaataaacccccaaaagtaccaccaaactgatacgttagcccgacagtgcatcacaagttgagctaaataacttctcacaatagtgccccactttacattattctttgagttgtaagggttacgaatttcaaaccgtaaagtttgacacgggtgcagtgcactacaccagccaggtttaaagtcaatcaaagccattaactgttacggcattatgaaatgctgtttagacgataccacatagtattaggtgaacagcaaagagatagcaacctgcgaggtttaaaagtacagttacatgaagtttcagcttaatttaatatttccatgttgcctgctcatttataactactcaccagtatcagatggacattattttttgaagatgtccagtcataaagttgagattaaaattttagcaccactgtatttatagataaaaataaaatagtcatctatatttaacaagcaaggttgattatgaaaac

SEQ ID NO: 551 - DNA, 559 bp, unknown
  Altogen  635822 strain
cccaagtgatggcagccgatgcggccaaacctgctgatgcagctaccgttaccactaccggtgaggttgcgcctgctgctgaagcggctaaacctgcagaagcaccaagcaccggcaagttcaagaatgacgatgagcaggtagcttacgcactgggtgttcaactcggccgctacatggaaaactcgctggatgaacaagaaaagctgggcatcaagctggacaaagatgtgatgcttggggctgttaaggacgcgtttgccaagcagagcaagctgaatgactctgacatcgaaaaaaccctacaaggttttgaagtgcgcgtgaaggcttccgctcaggcgaagatggagcaggacgcgaaagaaaacgaagcgaaaggcgctaaatacgctgaaaccttcgccaaagaaaaaggcgcgaagaaaaccgaatctggtctgctgtacaaagtagagaaagaagggaccggtgaagcaccgaaagacagcgataccgtagtggtaaactacaaaggtaccctgaccgacggcaccgtgtttgacaactcctacgatcg

SEQ ID NO: 552 - DNA, 561 bp, unknown
  Altogen  635822 strain
ttctcgttcatgaagaaaatggcatgtcccattatggttaacttgcgcatgcgcggatctcggtcgctatcaatccgcaaagtttagcaccagggtgaaactttctcagcttgccatcggcatgctacattgaatggaaattaaccggaggtgtctatggaactggacgaagaaagatgtgggatgattgccgcagaaatcggagcggtggttgttgaactggtccatgctggccaactcgttgacagaatggctatcgtgaatgctttggaatcgaaacgtagggctgtgggcaacacgcttcacaaaggcgtcctgcgggatgcggctgcattgattagaggtaatggtgaccggtcataatatggatatcgaatttcgcggtttttggtgccgaaattttcccgaattgaaacgagaaatctgataggtatttgaaactaaaggatggaaaacgaaggtattgagaggttgattttgatggattatgaggttatcacattgaatttaaatgctttattgaaaaattgacacataaaggaatcgtactcggtctttttt

SEQ ID NO: 553 - DNA, 614 bp, unknown
  Altogen  635822 strain
cccccagcctctagagaagtatttgcattgccaaagtggactccgccagagaagcccgttctacctttaaccagcccacctgtcagcatgagatagcgtgcatcggcttcggttttattccaggcccccacatccacggcctgcaaattgacatccgcactcaacggctggccgtttaccctgatggaacgtagcgcatatttctgcgatgcctgcgcatccgtcagcgcgccgacctctgacgctgtaggtttgttctcagtgctgtaataggactggaacgtcccccagacaccaccgggagaggtgcgataacggacaaaggttttcgtggtggcagcccccgcctgcatgaaaatctgcttgcgactaccgctatcgtagcaaatcgataacacctcccatgaagccccaaggttggggctattttggtgctttccagccgcgaggccaaagaaaccactgcgaccaatctcgttggcatcggtcacggtgacacaagcagcccccaagccgaacgcgccgacctccatcagttggccggttgaggttcccacttcccgcagcgctgccgctttcagccccaggctggcacgagctgtggctttatcggg

SEQ ID NO: 554 - DNA, 756 bp, unknown
  Altogen  635822 strain
tcgctgaggaactcaggaaccgccataatccgcccgtagtcgccaagggaaaggtgcagcttggttagctcgtcattgttctggttgagggtgatcccgtcccgaaattgcagggatgagcgctgacctgcaggaccatagaacgagatgaggcactccagcgtttcatggcgccatagttccgtacctgtgtccgtggtgttggtaaacgccgggttgtcatcaggggtaactgacagcacgccataggcgcaccaatttgcattggcatcaggcaacgttctggttttttcctgcggctgccagcgggggaacatcatcttgccaggcagaccagacacggcgctgatccagcgggataaattccgctctagcacctcgtcataatcggtatcgtcaacaatgggagtgagccagccagcttgtgtgctgtcattgctcaatggcggtacctccgtcgatagggttcagttcgcagtgggcctggacgaacccggcaccgtacgcggtataggggtccaccgatttcaccaggtattcgcgattttgatacgtcacgatgtcacccagcatgccggtaccgccagaggtcagccgttcggtggtgacgatcaggatgttcccggtgaccgcctgcccagacatccggatttgcgcctcgattgaccggtccaccgtaaccacaccagaaaaaggaaacgaggcgatcaccgtttccgcatagccatcgtcatcaaccaccacggtgcggcgctt

SEQ ID NO: 555 - DNA, 762 bp, unknown
  Altogen  635822 strain
ttttacgccatcggtgcctatacctacgcattgctgaaccattattacggtctgggattctgggaaagcctgccgctggcggggatcgtcaccgccatcttcggcttcctgctcggtttcccggtgctacgcctgcggggggactatctggcgatcgttacgctcggctttggtgaaatcgtccgcatcctgctgctgaacaacaccgaaattaccggtgggccaaacggtatcagtcagatcccgaaacccaccttttttggtctggagtttaaccgcagcgcccgcgacggtggttgggataccttccataacttctttggcctgaaatacgatcccagcgaccgcatcgtgttcctctacctggtagcgctgctgctggtgatattgacgctgtttgtgattaaccgcctgctgcgcatgccgctgggccgtgcctgggaagcgttgcgcgaagatgaaattgcttgccgttcactgggcttgagcccgaccaaaatcaaactgaccgccttcaccatcagtgccgcctttgccggtttcgccggtacgctgtttgccgcacgtcaggggtttgtcagcccggaatccttcacctttgtggagtcagcctttgtgctggcgatcgtggtgttgggcggcatgggctcacagtttgcggtgatcctggcggcgatcctgctggtagtgtcccgtgagatgatgcgcgatctgaatgaatacagcatgttgctgctgggggcgctgatggtgttgatgatg

SEQ ID NO: 556 - DNA, 797 bp, unknown
  Altogen  635822 strain
tcaataccatccccgttttttaccgaagtataaaaatcaatatcatgcaaatacattccgtcacaaccatgctcttgtgaaattgcccagcacgttgtcttttgcattttaaaattgcaaatctcgtattcttttgagtttgcaagcaggatgccgattgttctccaaccgtaggcgtctccaacccatgggactgaagcgccaccatctattgggtgaggggctacatatggcacgtcagggccttctatgaaagcagttgtaataccgctgccttttatctttatccctctattctcattgagttttaaagcatagctgtatgggttggccgaatcaaccacaatgcctttgttacggatgatattatcaaacacgccgttctgaagctttaacttggcgttatcgatgtacaacgtcgtatagtcaggaagtaacaaggactcagatataagccaagtattcgtgtttggcacagtaacagtatcgatgcccagcgtcagcgtcccaccaccgttaaattcaattaaatccagagcagcttttattcgatctgtttgtgttgcaccatcaaaactgttcggcgttataaataatgattcgtttctggctactggtgcgtttgcttcaactggtggggtgtaaaatccgacagcttcgccgcgatcgttgaaccctgccagaatatttccgttatctcctctaaccgtccaaacccagccgtctgcagatttggctgatttcacttcttcttggattgtcaaaggtaaaagaaatcgcccatctccgtaaattat

SEQ ID NO: 557 - DNA, 1245 bp, unknown
  Altogen  635822 strain
cttacttggatcgacccattaggactagcgacttgccctacgattaagcaacgcgttcttgataatatagcggctagtaaggcggctagagaggcatctaattttggtgctcccccacctccaccaggaagtcgtacgagagagggatttatgaatgcacatgtttcacctgatcgtgaaacattgttatttactagttcacctggatttaacaacaataatggtaatgttggcgggcaattcaaacgatatggactggactcgcatgctggaataagtcctcacgtgcaccaaccgacaagaaatatatccccgaaagatggctctatatatggtgggcaaggcacaaaaaccagtaatggtggtgttacagcacctacgaataaagatataaaacaactatatgaccatgtttataatgggaagtataatccatgaatagttcttcaaatgaaaatttcgattgcactcagctagtttcgtttagatggaataaagatgaggtgccatcactaaataatgtcaatgattttgaatctattggcttcgacgtgttgatgaatgaatctattcgtcaagtaaaaaaagaatacttcaaaacatatgagggtgaatattttattgaattcgccaatcaagaattttctggtgaatttgaggactggttggtttatgatacccctcctttaatggtgattaaatttgctgatgcaatatctttatttttaagtaacaataacttgaaggattttaaaatatttatttctttcttctctgagatcggtgtgagtacaaaccactcagtgtcggttagttcaaatgatatattgtcagccttattcttaatgtcgaagagtaattttgatgtttgggtggataatttaattatcaatgtgctagagtaaagtggatattatataaatagctttttatactgatggctggaaagatcattttggggctttccggcttttttaactgccattatgcaggcatattactttgctttaactgaataattacttgcctgagaactatgatgatgtctaatttgcactgttaagctgctttatgtcgtcattcccccaccaggtatactcgctgttatcccacaggtatcattgggttatatccctgtatctcaatcagtcagtgtttactttactatttgatataaaatacttttgtgcagataaaactatcaaggtagggcggtagcgggattaagatccttgagtatgatgc

SEQ ID NO: 558 - DNA, 1407 bp, unknown
  Altogen  635822 strain
aaaaaagaccgagtacgattcctatactcggtctagggaaagggctcttgggagagagccgtgcgctaaaagttggcatttatgcaaggtttgttcaaccgtgcattctaagaatagtccaaggtgcaagttttgccagcccagcgcacacaagtgatagttacaaacagaaattaattacgtacatctcgtcaccacccgtaaacttttgcataagtatcgggtggttagctgattagtcagcacacaatttttctgctctttcgcggaaaggttgcacgctcattttctgaccagggtggttggcgtcatccagcaggatcacatccagcgattgggcacgctgctgccccgctttcacctgtgcttctgctgcttcattgagtggatactgcatcagggtgctgttgttaagcacaaacaaggcggcccctttgcgacattgcagcgtgacttcctctttggtgaacgcccactgtttgccgtactccagcttagtgacgttaaccagcttatctgccgccagcgcgctcgacgctgttgccagcagcgcaataccaagaattacagatttcatgtttttggccttaagttgcgatttaaatcgattttcccgcagtttgggggcatccggcaaggcgcaatgtcataccggtgcataggttgcaaataaactcaccaacagaagcaccgcagcacccaacgccacctcaagccagcaggcgatcaccactccgcgctgtgccagattgggggtggtacgcattgcggggacgataacgtaacggttggccaatgccaccattaccatcaatgccaccagcccggctttaactaacaacaaacgttgataggcggaatcgagatcgactggccagcggccaaggataatcaggctgttgattatgcccgtgacgatcaccagcactacggcaacatggccccagcgggagaaacggatcagggtggcgatagcatcgctacgccactgcggttgtggcaagtagcgcaggcaaaacaacaacggcaacaggctgccgaaccagtagcctgcggccaacaggtgcaaggcgtggttaactcggtgtgctatgcccaatatgcccgcatgcatcgccgcatggccgataaacgccatgttgatcagtagcagtgccgagcacagcgccaacgcttgtccccgctttgccgcaggcaacagcaaggctaacaaggccagcagggaaaaacccagatgccagcgccaggcctcaccaaaggtggtgcccaacaccgcccaccaaatgctcaattgccaggtatccacccagccatcacccatcaatccggcctgaatagccagcatcagcaaggcggttagtgcggagatccaggtcgaggcgagcagcagcgggcgcacatcgcggg

SEQ ID NO: 559 - DNA, 1480 bp, unknown
  Altogen  635822 strain
agtgtgcccggagttcagggcgagcatggatgcttaaatgaaccacgagtctgtctggaatattgaaccggtaactcatgacgagaagcccaacaatcccaccgggtgtgacggtggagaacctgagcggcagtgacctgcagcatgcctgcagggtgatgtaacccgctgacaacgggggttgaggcgagatcactaagccgagatgatcctcaaggttgagtattgaaaggttgaagaacatgaacccgttaatccgcctctgtgggttgaaacgtcaccatgacctacgtgatctgacaggtcatgcagggggaaccggcaacgataaatagctgttaccggacgaagataatcagacatgtaagctgaatatcgggtcagcagtttttttttcacaacccgaactgctgctccctgccaacttgcggcaagcaaggataaagagtgcgacgggcagcctcctcagtatgtctgagtccaggcaggtgaaccggggaaggtcagtgatggatgttaagggggcatggccccgatgacgcactgactggcggagcttccgtagtagtccgcgatggggaaagcccattacatggcgaagggaagcagtttaaaggtgtttgcgacgtgaattaactgacctaatgaggtgaagacctttgataatcagcgaaatgcaacgcaagcttgccacatgggcagcagcagacccgtcacgacgggtcaaacgactgctgcgtctgataacacagccagagtggctggcagaagctgcgcggatcacgctttcatcaaagggtgctcatacacccggcgttgatggtgtgaataaagcgatgttagaggccagactgtctactgaactgcaaatgctcagagatgaacttctcactggtcactaccaacccctgccagccagacgggtttacattcccaaaaacattggcaaacagcggccactaggtatcccttcgttgcgggatcgtattgtgcagcgggccatgttgatggcaatggagcccatctgggagagtgattttcatacgctctcgtacggtttccggcctgaacgcagtgtccaccatgcgatccgcacggtgaaattacaactcaccgaggggagagaaacacggggacgctggattatcgagggtgacttatccagctacttcgacacggtgcatcatcgcctgctgatgaaagccgtacgccgcagggtcagtgacccgcgctttatgtctctgctgtggaaaacaatcaaggcgggacatattgatgtcgggctctttcgggcagccagtgaaggcgtaccgcagggcggcgtaatatcgccgttgctgtcgaatatcatgctaaatgagttcgatcagtatctgcataaacgctatctgagcgggaaagccagaaaggatcgctggtactggaatcaccgtatccagcgaggccgcagtaccgctgtcagggaaaactggcaatggaa
